United States Patent Application Publication US 2004/0265849 A1 - sequence listing, part 8

SEQ ID NO: 6893 - DNA, 24210 bp, Homo sapiens
tttaggtgggtttggagcagtgctcagtgtagaactagtaattagtgtagagctaattattcctcacactgaggcaagacattcctgagtactctacccaatgccctgtaaattataagtttttccagtatggctggaggtaacaagcactttttctgaatctctgatgtattttaatggttctttctctggcctcaggtagtttcagcacacacatgtgttaatcgacactcttgaatacttgagggagacagtatatattgccctttggcttagcagacaaaagcaaaaccactcactattgaaaacggggtggcagaagtgattaaataaagaagtttctaaaatgttaactgcttctctataagtgatgaaattataggcagttttaatattttctatattttctaaaatgtctacaataaatatgtatcatattcactatttagaaaaacacaatgttgttaaacacagtgttgttatttttgttttcattttgggtttgtttttgtttttgttttagcttggatttgctttcacatccaggctataggtttagtttgtcctcagttttggaaagggcagtctttactaaaaaaattagagcttctttattaagtgaaaacagacttaagatttggtaatacagtatttggtaatagctggggctattaggatagtatccagtaattctggggaggtggctgtgtttaccttcactccttttccaacttctgcagcaactctacctgtcccccttccccagatagtttttgccacttcatttttaatagcaggtgcttttgctcttgtttgctaagccaaagggcaatgcagaattatcatgcttctgcaatggaaatacagccaaatctttgctcacacgtagagagccaacgacatactctagaaacagaaagccagacaggtgtgagctgaattaacatggtttcaaatgttgtttgaatgaaggtctcggctgtggaggaataagaatcatacatttggtcctttgttttcttgggttattataggtgtccttttccataactactgaataatctgaaggtctttccagagataaacagtgttttccaattgaggcagttcttttcagaaatttatgaggaacaaactgagttctgttcacttttattaggcaaacaatttacattttcttatgaaaatgaagtctgcaaacaagattactttattaaatcaccaccttctcagctgttctcctctgtggtaagtatttgctgtgatttaacaagcctcccaccagcctcatgagcatttttaaaaatcatttcttttcctctgagatttaactaagacataaaatctttttatttttcagacctcttggaaaaagcggtttttcatcctgtcaaaggctggggaaaagagctttagtctttcctattataaagaccatcatcaccgaggttccattgaaattgatcagtgtgtatccaagcaggaaaacttttataacaacaaatactataaagtcaaacagtaacaagttgcatgcaaattgaaatttacataattgaccaaaggaacctgcttcaagctgattataatatttgtgactgaataggagctaaaatagtgagcactttgagttaaaagatagttgaatatttgtttcatattgtatgtcatacttgataagtctttaattaacaggcattcagttaaggagtttgattcacataatttgtggatgagagggagcagatgaaattgtcattttataaagtcaagatagagttttaaaaaatatttagatcagctttttttggtcttctctttaataaattgtgcaccccaaaattgaaaaacataatttgtggaatcaagaatccaattaaaatagaaatttttgaatcttaggctaaacaaaataatttcaattaattaaccagatcaaaaaatccaaacttatcttctaaaattattggacaatcttggaaacatggatccagcacatctaaagttttattccatttgaatcccaatataaaatattagttttctatttctgtatttaccttggtttaatactttgtgtctatatctaatagaaattccagtgtagaagttggcataagtagccaggaaaagatgcaatctgtgcagaagatgtttaaatgccaccctgatgaggtcatgtccatcagaaccactaacagggaatacttcctcattggccacgacaggtgagagaagtaagataacacagaatatctactgcatgcaaaacaaaaacaaaccaaaaaacaaaacattttataccaataaacatgttctgaacccacgctacaaacctcaaatgccatcttggcaatcttagttatttttaaaaatatcttgaaaagttactgagctagtttcctagggctgctataacaaagaacctcatcctggataactttgaacaacagaaatttattgtctcactgttccaggggctaggagtccgaaattaaggtatgggtagagccatgctctctctgaagactccaaggaaagatttgttccaggggcctctcctaactattggtagttcccttggcttgaggcaacataactccagtcttcacatggcgttctccctgtgtgcatagctctgtgtccaaatttcccctttttataagaacatcagtaatattggatttggagccctctctattccagtatgacctcatcttgaccaattacatctgcaacaaccctctttccaaataaggtcacattctgaagtattgggatacggaactgaaacatacaaattcattgtatttttgcggggagggtacatttcaaccgataacagtcaccatcaccccagaagcattccatgtaaaagaacccaatacaaaaacatctacacaagctacatatattagggaggaactaggcttgcccccaaagtagtctgcagtttttaagaggggcttctggtcctagcaaaggtgcctagtggactcttcatggatgattatctgcttgagggagaggcaaagcgggtgtgggagagactgtgcagaggaggcggacaatgccaaagccaacatatgaaaaaccctgatctgtttcagattgaccaaagcttccttttaagttgtcctgtgagtccatagaaaagatgtgattatacaaattcactcaagcacattcttcatcaacacatgcactccctaagggaaggcccacctgcatagttacacaaaaatgacactgacaggttagggggcttgcttgagaacacaaaggaaatcaatgtcaaagccgaaagccccaaaccctgtgattactactattattttctacttttcttccctttctctgagctttccttgcagaggtggctgagcattaattctagtgtgcaaatgtggaggtggcgaggccatttaagctacttaggaaaaattcttatttcgctggtacctgctctcaccaccattctaacattcataaaagaatccttctctggttcaaaaggcactattgttgccacatgccaactgaaagtttattcctgtcaacagggagaagattaaagactgggtctccttcatgtcatcatttcgccaggatataaaagcaacacagcagaacacagaggtgactccatatcactaataaaataacagggcacctgaacacaaccctctttcaatagaaaacaatggtagctttcctttgcctccttagtaactggctttaatacaaggaataaataaatgagaaaatgtacatccttattactttttatgattaacagaaaaaaattcttttgtgttttgtgagagagctaaagtacagacacttcagatttttattattgtgttagagggaagaaaagttaactgtgacatttttaagtagtagctagaatatagtattttccatcattgttattcaaggtgcatgacaagctcccttttgaatgactaagtctagggcagtttctataaaaatgttttacatgtatcttgcatttttaatataatgtatctttcatgtacatgcttagcagttttaagttttaaacttatttcaaaagggcctctgctaatgttcctttctcagggcagacctttatagatggaactttggtccctaggtatctttttttgacatgttttctaggttgttccatgcttacagcaaaagccaaagagaaggagaaatcaaggcatgtcttcaagtagactgaagtgattagagcaaagggaactggggtggagggtgtcagaaagagacacagttgaggagacaagttgagggaaacgctggtcatctctgagggtcaggctaaatgtcctcaagggtttggaaacaggagagagacaagttcggctcttgtcttggtgaaataatgctggcaggccagcggcatgaatgttagattgctatgggaaaagacaggaggcaaggagcccggtagagaggctgccgtttcattccagacagagatcaactgtgccctgactgattcctttttttgtgagcaggaggaactctcattgggtaataaaagaaccctcttctactccagccctctccttggcccttccagcacatcagaggctgttggctccagctcaccaagaaatggtctccaagacaaggtaatggggctcacttctttctcaggacaccacacctgggaggcagctaatgcctaaaaatcttaccaattagcaattgaatttaaccatgcccaccttcctcaaagcccgatgcactataagaaagattcttagccctgatgtttatcccataccacagatgagcctcactgagggcttgccctgaatacctctcagtgtattcattcattttagatgctcttgatatgctttgggtatgctagggtaagacccctttgctaaaccaaaacctagctggcaacttgcttcctttctttcacacagagggcacagatccctctgccaaaagatttcccagacactacctgatttctgcccattctgtctgtactcctcaggcaaaggctgagtttcttgttaatctcttccctttaccctgatcaatctcgcttctcattcattatagctgtctatcacttcttcctcatttctaatgaaatccatttgaagacataaaatataatgtacctgcctcttgaaagcgacttgtaattggaccttcagctttcttggatttgcaatgttcccaacttgggatattagtcataaacatgctgagtggttttgttctctggcacggatactattttgtctcttagagacttatccattgactttaccctgtccatgtataccaagcacatctaatgagtcctagtcccttgttttatctagttggtagctctccaactattttgaaagctttttgtagcatatcaaattcaccatgccaaacacctcacctcagttcttcatttagcgagtagaaacggtggtatgcagcagttaggaagcttcacccttgtctgtaagtgcctcttgcttttcactcatgatatctccctccccctagagataacattattggtcactttgccttttcacactatagatccagtgatttttaaaccagctcgagttaacagtactgtttgccttgctgggtggtgttgttgttggttaaattaagtgggctgcctttacccccaactcagcatgatccggctccatgagcttggaacttaaaacatggacagaacttaaacacacctgtattttaaaacttgactttttttctagagaacattcagggtcttttccaaaccccctgctctgaggcattgttcttggaatttttctgccatgcaaagaagctactttagtagaatattctgtatctatggggaaggggaggcaatagtggttgaatctagatcacctggaaacccataattcatactatcatatgatcaacacaaccaaattccattgctgtggaaacaatagaagtgtgtgaacagaacacaaaagaaaaatatggagcaggaacaggaaaggtgcaacgccttgattctgggttaattacattcttagatggcactggatgattacaggaaaaagatgagggtagcaactccagagcttagtgacttagaatgctacccacagggctggtcatggtggctcatgcttgtaatctcagcactttgggaggctgaggcgggtggatcacgaggtcaggagtttgagaccagcctggccaatatggtgaaaccccatctctactaaaaaatatacaaaaattagctatgcatrgtgatgcgcgcctgtattcccagctactcaggaggctgaggcaggagaatcacttgaacccaggaggtggaggttgctgtgagccgagatcgcgccactgcactccagcctgggggacagagtgagactctgtctcaaaaaaaaaaaaaaaaaaaaagaataccacccacaggagaaaaccacttgttctgagtgactgttccaaacggtagagaaaaaaagcctgagtgatgtgcttatatgttttcatcctcagtggtgacccagactcaagaggcaagttcaagttgtgtgagcttctggatgtaatcttggaagaccctctggtcttttttaacccaactaatttattacggcttttctagaatgcatgtgatttaattctatctcttgcaaagaaaaagcaaagcatttttatctcttttcttcagcatttaatggaacaaagttctccaggatttaggcaaactcacctacaagatttatcagaagccactcaagatgtgaaggaagagaatcattatcttactcctcgaagtgttcttttagaggtaaccccttcttgtccattcatcatttgtttctttaacaaatatttactgaaaccctgccatgcacttttcgtgcaatattaggctatggtcagtgggaacacagaagtaaatcaaatacagatgacgtgctcatggtgctgacacttgactaggagacagctgtaatacaagacagagggttctatgctgaagagagatgcttataaaataccaggggtgcatgagctatgggaggaggagatgactttcaaacaaamgatcaggaagatttcagggacgagatgacattaggccatacatgatgagtaaaatttggatgtgggggattgccttgaggagtctttctgcattcttagcagaaagaataatatgagccaaggtccttgggtgatcagttgtgtgctgtgtatcgatcagtctattgatcagtaggaagcccttactgaatgccttctgagcactagtcactgtactgtactgggcatggtggctaaagtaatgagcctgacatcaccctgctgtcagagtgcatagtcttgtcagttaccacaggataacgctgcacaaaagacgtggtccgtgtgctctggaagcaatagaaaaagaacagattttctctatcagagtcaaggaaggcttctgggatgaagtgccatttgatacatgtatggggaatagttcagtgaggctgcaacctagagtgcgtgaaaggcatagtgggagataaacagaagaaaagggccagcccatgatgggtcttgaatgccaagttgacttcattctgtagacagcataggggaagcgatggcttctgagttgggaaatctcaaaacctgaattatcctccattagtattaactgagcagctatatctgccatggactatagagagaagagaatggaagtgagagataggaagacagaatggagggtgggaatgctgygtcatttcccaaactgggggttttccgtaagatggtgacgtatgtttatataaaagaaacattctggggtcaaataagttccggaaacacccagttaaaataagttaaacaagcttcttagcagaattctcagagcatttagtatgcagtggtgcattgtaaatagtcaagtcagatacaacacatggcatttcccaagctcctttgagcacagagttcttctttcaccaaaatattttcatatttctgtttcctgggatgcagtcttttatgatagttcagccaaccaatcagatgtgtactgagcatcagttataggcctggcctttgctaggtactttatgataagtaaagtctagtaaagcagacaaaacagctaaaaagaccaaagataaataaataaataaatawgtaaaaaaactatgcaatggaaattgagagaaaggagagctctgccgtagctgaggtgatcagagtgggctgtgggacttcagccaggcctgaacatgatttcagtaggccgaaaggaaagatggcactcgaggtgaagaagagagcacgaacatggcgatggaacagcaccatttgcagggggccaatgggaagactggcttgactggaaggaaggtttccatcatgggttaacggtgaacttaggtaggccttagggtttttgagcaatcattgccacaagtgactctctttgttctaagggggctatggagagcttcctaagggcagtatttttctagaacattgcaatgtccctgaagccacttgggctgcctgtgagcatagtaacctgagaccagcttcacattgtgtcagagtctttgtcccagccaagtgccatgattctatagtagaactgattggggaaatgctttcatgtcattaagtgccgaatggtgaaacagaaagataaacagcaatttagctcaatagaaataacacttgtatccggagcatgagggatccaggagaagaaaattgactttgagtcctccagaagctttgctggttcagtctcgcggaggtaaggttggttgatatttctcaaatgagaaccacgttcatccactggaaactgtacctctatgtcagagcccagagctgttaatactagaaataagaaggtacctgacttatcggtaaactggrattcttacatctattcctyttatctgcagttggataatatcattgcttccagtgattctggtgaatccattgaaactgatggtccagaccaggtctctggaagaattgagtgtcattatgagccaatggaatcctagtaagtcaaaatgccrtttcaaaatttgatgtttgctcatctgctgttaaggaacaatgattgtcagttcatttcaatagttgataaactgatgccaaacattaccakagaccagtttccacatattattcagtcgtctcaamacacaaaaaatgagggagtcatgtctcttcccacagaaaaccaccgatgacatcctcaggaccttttccgtctcctgaggaagttatcttctactttgcatttatgtctctcacactctcacttctgtcctccaaacactgtaaagggtaattttgattccatatctatttttagaaggaaagtttgttgaatttgatgctagctgtggctgtgattctgatagttggacatacgtcaagaccttgctwgtcttcacatggctgttagctacttaaatctgacacacacaggggaacactgtaaaaacacatgctaaaatagggcttgttttaacttcttatgctctagttttttcaaagagacatcccatgagtctgtggatagcagcaaagaggaaccccagacccttccagagacccaggatggggacctccacctgcaagaacaaggctcaggaattgattggtgtctttcccctgccgatgtggaagcacagaccacaaatgaccaaaaggggtcggcctcactaactgttgtgcaattgtctatattaatcaagtaaagctcyaatttctaaaacttgatgggccctaagagcaaggcagcctccctcccacttttttttttaacttagaatttaaattttaaagctgttcctaaaaatctccaagtcagccaaaaacttgaccatcttctccctgtcattgatgttgtggccaaggagaggggatgatagatctcaagtaaagcagttcctggggcggggggtggcattttcagctatttttaaaaattcccccttggctactctttcaggtcccaggacttgggatccacaccaatctgagtagcatgtcactcagttttcccatgagtgtaattatggacatgcaagttgcatgagacttagttatagaccaggagggggttatttaggctttaagtgataccaagagcatttggtacgattgatgtaattttaactcttttccatgccttcttctatggaatcatttccagcagagaaatatgcagactggcctgatgtggacagttacataaccaatttagtccatttttccctctgttcccatagcctaccatccgctaccacatcccaagaggatttttcagtaacttaaatttatattattctccaaatgttttgracaacctttacctggacaatrtcatctcagaaatagaggccaaaagtctactcagaaagyacagttgagagccmaggtcagttgcctgatgtgacttttacaaatgtcttgttcatagtaatatccccgatgaaagccaagtggagaaactgaacrttttcctttctcctcctgatgtcatcaactatcttgcyctcacagaagccacaggacggatatggtaggttggagatttgactgttgtggattataaatggggctggaagmtttgaagagaacaattacatcttgaaacagtgtatttggcaacactgactaggtttggggcgggggagcttggactgttgactggctgttgttacaaaaaaatctttgaggcagaaatcagggtcttgttgtgcagaaaagtcagcctggaggtgagcagggggaataacaggacccaaaagttcaggaagcagccatttctgactcctctaagggaggaagaaggggctgggatacaggtggcccaaggacatcatttccaatcactgtacaatgagtatttgatgaatgagtgaaattagtgaagtcaacaagaatcagaggcctaaaagaagaaagcacatcagcttctaagacttccagacacaaggttaaaaaaaaacaaaaaacaaaaactgctagtcacagacacagacacaaaagactgtgtggcagagaattttcttaaagcaatcactgtctatttgatatggcatttttttaaaacactttgtaatttattttgatggaagatttcatcttcataagggaagaaaactctttaatgtaaacactacacattaattgtcttataagttctaagaagggaggaamcacaccttccatttttttaaatagtccacaatctaaggctcaatacacacttgactgaaactgtggactcctccataactgagctgctacattccttaattcatttatttgttcattatatattcattgtataatcattacaccctcacttccaacaaacgctgagcactctttctttacttggaaccatggggttttaaaaattaaaaaacaaaacaaacaaaaaggtgacatcatacttctggggtcatgtaacctggtaagaaaaagacagccacaaaaacaagtaaatgtaaaatgcattttatttaaaaatgtaacaaatcaggtactcacacaatgtaatagaagtccaggggtaggggagatgaattatagcagaggaatgggatgtaggatttcatgggcctttgtaagggtggtataatttgagctgggctttggaggaagggttaggctcctattgtagtgacagaggaaacaatattctaaacagaaggagatagtctacttcagaggtggtgccacgtgacctagaatcaggagaccctgcgtgccctgccctcctggccagctgagcctcacactggtattggatgttgtattcccactgcagtgtgtctcagtgggaaggccccccacgtttgggatgcatattttgccacggagatcatcttctggcagtgaatgacctgaaaccccagagcctggaggaggtctccctgtttcttacccggtccatccagaaggaggtgagtcgtactgaccagccctgaacagggcaaatcagtaccagaaggaaaaagatcagggtcttagatggagtctgagaagtaccctgaatacaaataaggttcctcattcttccaccatcaagtgcaaataacagaatgtgctttcaggactcyttcaggattctttcatatcaagtagcatttggagaaggcactgagctaagagacagagcacctgggttcaggacctcagatcggcatgatgtagcaaaaagagcttgcatggaatcagactggtgcagggattccaaaacagctccttcaaccaatttgtgcctcagttttcttttctgtaaaattatgactaatgatggtgctggttgttggataattaaatgaggtaatatgtgtaacgtgcttacaaaggtgactggcacatattaggtgctcaataaagctactagttacttttacttctactacaactgaccatggaatgttattcaagcccattttttaaagcctcagtttcattatctcagaaatcgtcacagccctaacttcctcatagaatattgcaagaattaaacataatatgtggtgctgggcacggtggcttacacctgtaatcccagcacttcggaaggccaaggcaggagaatcaattgagcccaggaattcaaggttacagtgtgctatgattgcaccactgcactccagcctggaagacagagcgagaccctgtctcaaaagaaaaacaacaacagaccacccctaatattatatgggtatgcactaagtatgttgttttttcaaggactagctattgtcctgcatatcactgcagtcttcatgtgttaattccttccctggtctacttttctttctaactagccctgtgaccttaggaaattcactgccttctctgggcttcagcttattctcactaaagtgagaggytggttttcaaactgtgcttcttgcatccccaggatggaggtgaaaggagaggagaggaaggagagagtatgctgggtcttcaactggagaagcttacatttatcttttatcttttatgaaaaaaagattagtccaaaatattggactttcctgttagctttccttaaaaaacagttctttggcttcaaatttctgaaaaccattgtattagatgatttccaaatttcttccagctctaggaattttgtgattgtgtagcatatctatattaagaacacatcttatctcttctgcactacgtaataatcccattggtcacacaaattgtgccatccctattactcattaccctaaatgagtaattccagtgaggataagtgaatgagttgtctaagatatataactagttagtggcagggcaagtacacattcgttcactttcttttttttttttttttttgagacggagtctcgctctttcgcccaggctggagtgcagtggcgcaaactcggctcactgcaagctccgcctgccggrttcacaccattctcctgcctcagcctcctgagtagctgggactacaggcgccggccactacgcccagctaattttttgtatttttagtasaaacrgggtttcaccgtggtctcaatctcctgacctcgtgatccgcccgcctcggcctcccaaagtgctgggattacaggcgagagccactgcrcccggcccattcactatttattgagcatctgctgggtgctgtatactgtgctaaattcaagagctacaaaaatggcctcagcctgagctgaagctcacagattagtggatgaagcaggcatgttatgtgctacttgctatacagtgtgtgccctgagatatgaacacagggccataggatcacagaggtagaatggagtaaatctacatgaaggaggccaggaaggtgtctcaaagaaagtggtgtttggcttaggttttgaagactggataggagactgcatggtggaaaagaagtagatttcagggccctagtccaacaatctggtaactatagtacattttctctgccaaagatccacactgggctgggtgtggtggctcacacctgtaaccccagcactttgggaggcggaggtgggcagatcatgaggtcaggaattcgagaccagcctggccaatatagtgaaacmccgtctgtatgaaaaatacaaaaaattagctgggcatggtggcgggtgcctgttatcccagctactggggaggctgaggcaggagaatmgcttgaacccaggargcggaggttgcagtgagccgagattgcaccattgcactccagccctgggaamagtgtgagactctgtctcaaaaaaaaaaaaaaargatccacatacactggggccaagtggtcaatataagcttctgaactcttctgaaagttaccaaacactactctgacccaaagatccaggcattaattcagaagccaagaaaagggtttttgcctgtgagcagatccaggaactgtacctgggtgttgctgactgcagtttatcctgactgcctttctagactgtggagtcattgcatttctcttgtgctcgttctgccttccctttctaattgataacagcccctacatgctattgagaaatatgcagtattcatcttcatgattatctggaagatagaaaattcccttactttcccactgcctccattcctgatttctttgtgttgatgggtatccactgctcttttaaaattcaaacacatagtccctggaaggaaaaagaatattggaaaagggagatatggaaccaaaggaagaacagccattggcccttgatgttttaaagtgcctgagccaatcccatttactctccttcctgttatgctacagatgagggaagtggaggttggggtggggatggggcagggattgggaggggagagaactgagattttcaagggaaggggagaaggtgtgtgcaggggaaggacatgacaggttgcaggagaaactgatcaagtttaagtttcctcccaatcttgtctgggggagtcctgtctggtggtttcattttgattcacttgtttgaagaggcctttttaattcttggtgcaattggaccccttagagcaccatcaatgctacctggatccttccttaaaagctcagcttccttttcaggccatggatgccagaaaataaaaatccaccttccacctaactagccaagtaagtcatccctgtctatttctggcccagatattacagttcactgcaggactttcttcaataccagctcccaagggtatgaatgaggacagattgggaagcaacaakcttaaagataatctttagccayttaactttcttctttcttgtgttttagaaattaaagcttaccatcggcaggatcccaaattcagagacattccatgcygcatcctgtatgtgtccctcaaaatgccaaagtgctgcaccttctcagctggataagcctagactgaacagagctcccaagaggagtccggccattaaaaagagccagcagaaaggagccagggagtaacgcaccccagacccatggcagcagaaccaggatggagctgggactgtccagctctgccccctgctgctgccatgtgataggagacagtcggcacccccctctgaatttctgyatctgcatcttaacaatggggatgactatcccctctctggttattgtatcagagatgytaagagggtcatgtggcatgattggagaacctgggggaattggaaggccttattatctcagctattgtcccaaacaccacagacacagattgggtcagtccttcatgtaatacatgctgtgttctgtgaggatgtggtccacacaattccttctttgttaagggacatacagttgcaaatactcactgcatgaaggcaagattcccaagggagatgtgatagctgatcaggcttcccagacacctccttcccaaacacctccttcccaacacctccttccccaacatccttcccaacacctccttcccaacacctccttcccaaacacctccttcccaaacacctccttcctcaacacctccttccccaacacctccttcccaaacacctctttcccaaacacctccttcccagacacctccttcccaacacctccttcccaacacctccttcccaaacccctctttcccaaacacctccttccccaacacctccttcccaacacctccttcccccttccccaacacctccttccccaacacatccttcccaacacctccttcccaaacacctccttccccaacacctccttcccaacacctccttcccacaccttccccaacacctccttcccaaacacctctttcccaacacctccttccccaacacctccttcccaacaccgccttcccaacacctccttcccaaacacctctttcccaaacacctccttccccaacacctccttcccaacacctccttccccttccaacacctccttcccaaacccatccttcccaaacacctccttccccaacacctccttccccaacacctccttcccaacacctccttcccccttccccaacaactccttccccaacacctccttcccaaacatccccttcccaaacacctgcctctcttcaaccccacaggccagagtgctgagacagagtggccttttggattcaataagtatcttgttctcttaaagactcagcaacgattttagaagtcgcagcagttttacatcacatgcagccaagatcagcttgctctacaagcaataacagaactacttagcacttcaaggttgaaagttcttcactaatggatccattgactaattgatcctggaaggccaaaggaataaaattcttttatataaataggaaaacaaaggcagagagctaaagcactaatcaaatcggggggtgttagagcaaaaacaggcttcagaaagagtattttaccaygcttcacatggaaaaaatcgagccccggagmgatgaaaggcatattttctttgtttctccaagtttcataaccgttcagttgcagaaccaagaatctaaaaccagctctgggaaacaaatgtccagatgccagcctcatagttgaacttggatttgaaaataccttcagcacttagaagagacattcaaatacatttcatttcctgttayccagattgttcggaaagtattaaaaatttttcatttacmtgctgatacggtttggatctgtgtccctaacaaatcccatgtcgagctgtggtccccggtgttggagatggagcctggtgggaggcagctggatcgtgaggtcrtgggggtggagttctcacgaaggagttagcatcatccccttggcgctgttctcgtgatagtaagttctcgtgagatctggttgtttaaaagtgtgcagcacctctccgctcactctcttcctcctgctcctgccgtgtaagatgcctgctctgtctgccacaagtgaaagcttcctgaggtctccccggaagcagatgctgccacgcttcctgtacagcctgcagaactgtggaccaatcaaacctcttttcttataaattacctggtcttggggatttctttatttaatgtgagaacgcatgcccttttggatctrctgtttctacttttataaatttatcmtgcagaaatacacaaatacacaaagatacatgtaaaaaaagtagtttactgcagtactgtttgtaataataaaaaatcaggctggacgtggtggttcatgcctataattccaaccctttgggaggccgggacaggtggatcacctgaggtctggagctcgagaacaacctgaccaacatggagaaaccctgtctctactaaaaatacaaaactagctgggcattgtggcacatgcctgcaatcccagctacttgagaggctggggcaggagaatcactagaaccgggaggcsgaagttgcagtgagccmagatcatgccattgcactccagcctgggcaacaagaggaaaacccagtctcaaaaaaaaaaaaaaaatcatgtgggtattgcttaattctgatttcatatcaytgaacactgtagatattaaaatgttcagcaggcacagttctgtaaaattgttcgtgatacattaagaatgaaagaatcaagttgtataataaggataacatcatcccacttttgtacaaataaatgtttggtgtttgtgtgtatgtatatgtgtatatcaaatttcttcaacccttactagagtgagaggtccgtacctcccagggctactgtgaggtttccttataagtacactgcctgatcaggagtaaacactccataggtgttctttgtcccacttttgctctacgtgcttttttaaaaaattaaaacttagagtcaaatttttagtaaagagttatctctgagaaatacgatcagggttggccatgggaagagaggcatttctgtaatgtttgaatacttttttttgcaatgtgcatatgtcacttttataatacaaaaatacaagcgtgggaatgtatatataaatatatatgcacattttttttcttttaaaacagagtcttgctctgtcatccaggttggagtgcagtggtgtgatctcggcttactgcaacatccgcctcccaggttcaagcgattctcctacttcagtctcccaagtagctgggattacaggcgcccgccaccacacctggctaatttttttgtacttttagtagagactaggtttggccatgttggccaggctggtcttgaactcctgacctcaggtgattcgcccgcctcggccccccccaagtgctgggattacaggcatgagccaccgtgctcggccacatgtacatattttttaaactttcagaaatgagaagccaagccactacaatgaaagaaataaaaaaaaaaacctgcaggtaaaaccacctggcaaccaatagtgtgggtggatacacggctttgaagcccaaagatccttccctgggcctgctcagaggccacactaccaggccaataaatgctaaatggaggctggtggacaagccttacccaccagtctttccaccccctcaatgaggcaaagaacagcgggaggcctcaggagttgaatcactgacatggctcaaggaagtgccgggcccagaacacagaactcctggctcccaatcccatgctcttcccagcccagcacggggagatcagccaacttacccttggccctctcttaatcccaaaactttcctccaacatcagggccagctggggtccttgttattaggatcctgctctgggggcttctctcacatgaggagtttgttctcaaggaaaatctcagggcagattccaaggcttccccaactgaaagattctgattctgcagatccggtgtggggctgtggaatctgcattctaacagccaccttccctgaaggggatctgactgcaggtggaacagggaacatacactggggagcattgtgcctggggtcccgtggagaggcacgcgagtcctcccaagaggctgcagaatgtggaggacgcacacgggcgttattgaggggagaaggcccacagtttccaatagttccgaaagacgttaatggctgtcaccccctccccacctgcaaaaaggcttgattcctgaagggagaagcctggctttcactccttgctatctgttacttagggaagggtacaaccagtgcctggaggaactgggcactgccacatgctgttgtgcagttgaggtggagagaggagcccacagctttggcttcagcaaagccacttctgcctgccgctcctcagggcccgggttcactcctctatgccccttctttcccaggcctggggaccacacttccccaggggtccaacaaggctctttctcctgaaaatgggagtggccccaagggaagctcatgaccaaactggccccaaagcccagtcatcaagccatttgtctcagacctcagcttttagagccctcttctgctgcacggctaagaaaagaaaggtataggacaggctgctgggagatgcagacagttcccaggccgaggctagaaaaacacttgtgcctcatatatatatatatatatatatatatatatatatatatatatatatatatatatatataattatatgattctgccagagctaagagggtgggacagaccctcctgacacactgcccaccacagccacgtccacacccaccctcagtttcttctgccacctgtgatatttccccttccagaactgcccttgatatttgtcccgacctggttctaggtgggtgaatgtggggctggggactacaaagtgattggctcagctgtcctgccaggatggccctgtctggcagatttctggaggaaaggaggtcatgagaatggactggagcaattcttggccatcacatcctcggctcaaatctggtgcagcccttcagtcttgctggagaagaaaccagagcccagacatgtggagatattggcctgggcttccccagctccatgccatgcctccacctcccaggccaacaccttccctgcactcacacttctcagcagggcatctggagctaccacctctccggcctgctctcccttccaaatgcttgccttatgcctgcagaacaggccacagagggagtctatatatttccactttgttctctcggctgaggatgcaaacccttcagagtgaaatcttaaaagcagctggtaggataaggaatgaatgcagagggccaaatacatgcatccttacttgaagctgtcaacatgtgagtgtagattccagcaaggtattcttctctacctagagattgagccactgtacattcaatatatgtacctaaatgtgtgtgtgtctgtgtatattgagggggagtggagaggacaggtggagaatcacaataattctttaataaggtaagatgatggcgcaccacgatccccccacctccatcccatttctctccagagcttgtgccaagtgactttcccttgagatgataagaggaatttaaagtatcataaacaggcccaaagggagaggatgctcagattcagctgtattaactcagagttcttcagtgaagttgaactttgtggatatgcaagatatgtgttttactgaaaaagctctttaaaatgtctgagttaatgaagtctttgtctaatgatcaagaatctggtaggacttaggggccgttctccatatcaactctggttagatggttctagaaaatgaagggaggtttaaggggcccccttgcagtcacagcactgggctctggagctgtgctgcctcatatgaagccactagtttcatggggccatttaactgtaactaatgcaaattaaataaaatttaaaattcagtttctcagttgcactagccatatttgaagcattcaataaccctgtatggcaatttggtactgtattagatggcacagatgtgaaatattttcatcatcacagaaacttctagaggccagcactgatccagagtattaagcccccaagaggaaaataattcacatctttcttattcaccaccatattcctagcatataaatatagggcatggcacataacaagtactcaataagtatatgttaaaagaaggaatgttctgttaaatataattcacaaaccttgttcataaattggtatttattaattgcatctgaccccagcaccaccccccgccccccscccccccaccaccacaaaaaatgttatcagagtcattccaatgtgaggctaataactactttttggtctggggtcagatgcaattaattgaaaatcaagctatgggcttttttttttttttttttttttttttttttttgagacagcgtcttgttcctgtcacccaggctggagtgcagtggcaggatcttggctcactgcagccttgatttcccagactcaagcgatcctctcacctcaacctcctgagtagctgaaactataggcaaacaccactgcacctggctaattttgtgtgtgtgttttttgtagagatgaggtctcactacgttgcaggttggtctcgagctcctgagctcaagtgatttgcctgcctcagcttcccaaagtgttgggattccaggcatgaaccaccatgccgggcctttttaatgtaagctattttttcaacaattaagagatttctaaggttcctatgcagcagttaataggcttggtgctgttatggggacataaaagaaatagaagatctaaaactctcttaaaaagagcttactacacagtgaggaagagaaaagttgagcataccatgatcttttgtttacctgatatgatttgagatggcactattctgtaagtttaatttttagcttatatgaatcataatctttctaaaatttcttaacactttcctgtattcttaaactcctcccactcagggacatggttatgggcattctaagtatctaccacactctaaatatttcctaaggagtactgagctgtgggggactattcccacctatgccaattgatcctagactgctttgtttatgctgtgggctgcaaaagcagaggatgcagcttgttctaaccatacacactaggaatcaataggctttgagtgtaggtccaagaggttttatgagtaaagatgttggttcttaatccaggggttctgtgacactgatttagagttctcagttgccttggtgctagtggtggtggtggcggtggaggtattgccatttgcttgcctcttggctctcaagtatgttctggataggtgagaccaccagaaaaataattagaggcagtgtaaaatcactctccaagaaaaatcagaggacaatgaactatcaaactacatggtgatagcagggttcagaaaggaaggagatcgtgatggaacagaatgccaaccatgactaacatgcagagagtgccttctatctgccgggcaatattcaaacactctactgactcctataaaagccctgtgggccaggtgcagtggctcacatctgtaatcccagcactttgggaggccgaggcaggtggatcacttgaggtcaggagttcaagaccagcttggccaatatggagaaaccctgtctctacaaaaatacaaaaataagctgggcgtcgtggcgggcatctgtaatcccacctgctcgggagtctgaggcaggagaatcgcttgagcttgaactcgggaggtggaggttgcggtgagctgagatactgccactacgctccagcctgggtgagagagcgagaccctctctcaaaacaaaaacaaaacaaaaaacagccctgcgagaccaggactcttattgtccccgggtttcggatggggagacaaagcacagagaagatacatcgcttgctcagggctatggctagtaccagacagagccagaactcagaccagaaagactggctttggagaccacaggcgtcctgaaagaggagctgaaactgagctctggaagagaataatccagcaagggacggcggtgcagacaggatcagacatggagctcactttccaaaagtaaaaacagggaacatgttggaatgactcatagaatgactcagcgtttttatacatctctcatttcagtaacacgcattcatctttgggcctattgcccagaagaatcacaaaagtggttccttttgtggttccgggagccaggggaattctgtggcagcttctgttatgactagtaaacgcgtttcataaccctcctttgagttggccatctggctctatattatactcaagttaatacaaaactaatgcatacttctagtgacaaaggcattaggctagtcctctggacaggagataataaagaatccttggctttgtagacctcgtcatcaagtgaaggtaataaaaacatacacatagatacctacaaggcaaatatgattatcctaaatcctttgttaaagtcacaactcaatgttacaaacacaaaaggcttaaagactaattctatctagttggtttggaaaaagcttcaagggagggatatatttggggtgcagagatgtagtgggagggatttcatgtcttgaagaatgaataggattcacttaatattctagaacaggtcaaacccccagtgcacagccaccagaatgtaactggagggccaaagaagttctcaagcr

SEQ ID NO: 6894 - DNA, 48587 bp, Homo sapiens
tttctttggccaacaagaagattagctacaaatttgtagctcagattaatgactgtgtagagctgatggtttccacaatagcattctggttttctccttgatattgattaatccaactacacatccttgcctgtctgccccgtggatcagcctagccatgtttgtggccccagccatctctgaggagactaaatatagattgtgatgttcacccaacatctggctgagccattcaggtttcctgatttgggtacttgggctaagggatgtggaatgaatttccagctaatagttggagtgggtgctgtgtgtgcccacaggtcccctcttcacaaacgaggaaccctttctttcagctgccaggtgtaagctgcagagggctctcagctgaggattacccttaaccaaattattattataatataatttggttatatagtatatagaataatttcatccagttattttctgaggactgttcttaaccaaagagaattgcccaaagtcacacctcttccaggagggcagctcctatccaatggtaggaccatcccagtacaaaggtccagtcctcttgggtcatcacaggacaacactgaggccatcctagatccagaactttctgtggatgggcctctgttgcaactgcattgcaaccccttcttcttctgcccagtcctgctttcctccctcccccatgtgtacggaacccaagactacgcccctgtcaaactttctgcacacaatctcagtggctctatttcccagcaaacccaacctaagatggtagtggctgcagttgctggaggggcactggaaaggcatcatttctttaataaacactgggcccattgccacagctaaagagtaatatagtaaggaagaagagaaaatgaaaactggccaggcaatgggaagtcttagcttttcaatatattgttttcttcaataagtgctcaggtagccctactccaggccctggagtccatgcagtagagtggcaaaagcagttggcttgaagtcagaagacttcaaatcctggccctgttttaagctatgtgcccttgggcaatttattatatctaacctctctgagcctcactttctttaactgcaaaatgggccaaattaccttacagagtagttataaagccttgtaggagctcaggattggaaaaccacttgaaacacagaagctcttcaatacgtatgctcaaaaatgcattcctttcacaaatgtgggggcatcctagtgccttccaggtcagagaatgggacgtgcagtaccaatgaatttccagtggatatgaacatactgaactgagcttggggccttgcagcagagctgggaagggctcatgcccagttaacaaggcatttccattgctccttcctcccaaaagtggaagttaatggaacaggcaggggggctatgagaccacaagaaaaagcagggacttccctgcaggatgtcttctctgatcaatgaagattttaggaatttatctgaagaccagccacgtgactgagcaatttcattgtgaaaatgtaactccacaaggctggaacccaacctgtcttctttactccctagagcactgctgggcacatagtaggtgctcagtaaacacttgtggaatgaatgactgaatgatctttagttcctcaccccgcaaaaaagtctgatgatttccagatgtggtgtgtgtgcataatttctgggtaaatgctttgagggcagcattgtggcaacagcccaggggcccctcccatgtctctgtgtgcctccattgttttccagtatcccctctagctgtgcaatgctttggctgcatcactttctcccaaagcggtgtctgcaaaccaaggccctcttttagtaaatacagttttataggaacataatcatgtccattagcataagtgtcacttggggctgcttttgtgctaccactgcaggattgagtagttgcagcagaaaattactctctggccctttcagaaagtgtacattgatcccatcctaaagagatcaaattagacaagggttcatccccagaaggtggtcattccttccctgggttggagactagacttaccgagaaccaggccctttcatctctgaggggctcagcaagtctcatcccatggaaagacttcactgatttcaaagccagggtgttgtgcaaaggtctgttctatgcccactgtggcactaggcaccttacctttatgctcccatatacacctctcagtaacgccacgaagaaagagctacattatccctattttatagatgaggaaacggaggcccagaaaggataaatgactggcctgaggtcacacagtggggaggtggcagagctggggctcaaccccaggtctgttctgagtccaagctgctgcttttaggtgcttctctaggctgcctccccttcctgaaggcttagcaggaagaagcctcaaggtacttgaggaaaacaaacgtgaaacacgtttgttcaggcccaacaggtgattgctgcataaaaacaatccctcagttggtcatggtggctcacacctgcgatcccagggctttgggcggctaaggcaggaggatcacttgacctcaggagttcaagacctgcctgggcaacagagtgagacccccgtctctacaaaaaatttaaaaattaactgggcatggtggcaagtgtctgtagtcccaactacttaggaggctgaggcaggaggatcacttgagcctgggaggttgaggtttcagtgagccacaatcgtaccactggactccagcctgggcaacagagtaagatcctgtctcttaaaacaaaaacaaaaacaaaaaccgatcccttgcctagaacatcaaagggtgggtgtctggcaagggccttgtgaagaagcctttccttttggtaaagaatcagccaactagagaaaccagactcccaaggcctcccatgcagggcagggactccctccagcggtgcgtaacccaacacgtgagaaaatgtcacccagggaacagagagaccagattaacttgataacatctgaaacccccatctggatgagcactaaagcctttgtgtttggatttaaaaaccagagatcccaggtaggttagttccagctccccagataaagacgtattacgtgattagccagcctctttttccttctaaattaaaaggattaagtatattttagagaatgttctcctttaggactaactgtagaaatttatttaatttcactttgtcatgataacaacactttagggaaataagagacaatatgtggaaggcctgmagttattacaaaaagagcaaaagtgttccctttttgtttgaaataaagagaagattacatgtcagggaaattaatctcattacaaagatgaacagcaaactcaccaggtcacttcctgttgacacaggaagaaaagcttctggcttgttttctgggaatctctccacaaagtcagaaggtcagtaattcatgcgaggcagtggaggggaaaagagacgcctgagtcacatgagtgatttcatggtttgacttgtctgaacatttccgtttttgttttttaccgtctgtacaaacactgtgaagactccagcaaagtcctcatgtgtgctgcctccttggcccttgctctgggatcaagtaaccaccaacaaaatcctcagcactgcaccgatgtcctgtttagccaccatgtcactgtggccaccatgtcatggtaaccacctcccatcgtcctgcccatgagggttgctattccatcgccttgtttcactctttttcatagaaaccactaacgaaaattaactgtttactttttcactgtctgcccatctcctcctcaaccagttcacatctgcctccttcatccccacatcaccaatgcctggctcacagcagagcttctgtaagtatttgatgaatattaatggagtgttcatgaataagttgaagtgtgcttaaaatttcacaaatacttttagtttttcacatccagtttttcctttcacattgagttggctatgctatctaaggcatcctggtgataacatgtccaactgtcacatggataaagtggtcattcatttgttcatttcatccaacataaacttattgagcgtctatccagtgctgggcatctatgccaaggattcaatggtgattgaaacagagtgcctgctctcctgagttttcagtctaatggggacaatgggaaacaaatattaatgaaatagcaatacggctgtgacattacaacctcataaatgctgtaaagaagaaatgcatgcagggcttctgaggaagtaatgtttgggctaagagatgaaagatgcattaactaggagagttaactaaattaacttgctcaggagtgagcagggttccagttaacaaatttatggttgtcataaggattaggggaaggacagagtagggctagagaagaactttctaggaaaagggactacagccaggcgcagtggcttatgcctataatcctagcactttgggagcctgaggcgggtggatcacctgaggtcaggagtttgagaccagcctggccaagatggcgaaatgccgtctctactaaaaatacaaaaattagccagccatggtggcatacacctgtattcccagctattcaggaggctgaggcaggagaatcacttgaatccaggaggcagaggttgcagtgagccaagatcacgccactgcacttcagcctggatgacagagtgagactctgtctcaaaataataataataataataataaaaagaaaaagggactactaacatgggcttgtattatggtgatcaggtggatgttgatggtgtaggaggcggggtggggggagtttatggctgcctaaaataggatggagacaaaaatatgtggataaaagaaaataatgtggaagttatttaggaggtaaaatggcaggaccaggacttggctagtccttcaaggctcatctggtgactggggcattcttttgggctgggatctgtggggccctccccggctagcaacttggctttcagaagtagatgcagccactgatgcagtccgcgtgccaaacagggatggcaggtaggggcagggctgggcaggggggcacaggtgagcacatgcctccgctggcagcagcatttcaaaacctggatttatgactcaagtcaggaggattcctggaacccaggcatagatttctgtgggcagtcagttgtttacaggagattaagatcatgcctattaaagagatcaattgtgtccacaagaacccacacttaataggtaattgctgcttgacagaactctacctgcaaccagcatagctaaataaggaacataggaaacaattgtcctgaaatatgaacaccatgttttttttcctccgcttgatcaaagaaagactccagcaaaaggggaaaaaataattaaaaagtaaaagtcttacctaatgaggtttaaaacaaaacttttgaagccaacaagcaactgtgggcaacacttcaaagggcccagaatcaatgtttgtcaatagcagttttgcatcctttaatttatgtctcatgaatataaagtgtgatgttattaggagcccatccatgccttaattctgtttgagatttgatgaaccagaagtctattaacattctgtacaaatcagcactggcagaggcctgtggcacaggcttcacctgatcttttatcctgaggctgggatgctagtcacgctgtcaggcttcctgctcggaacacccagcagctgtcatgtgcaccgtggarccagggggctatgtcagctactttctttggagagtttctccccagaagagaaaccacttcatgactcagcccagccccaaagttgccatttgtttaatcaagatagttagtttgcaaaacattaaacattaaacagtatttgatgcctagttaataatttgcatcctcttcatttgttcctgaatccttggagactgacattttycccccctaaagscatagacaacaaaagaaattttattgagaggaaaacacaagtccttaaactgcaaagatgtttgccaggatgtctgatctccatgttctgctgttaatggctctggtgggaaagacagcctgtggggtaagtgttcttttctaatatttgtagttgagagactccgaagtttactaggaggaccaagctaggctgggagtgatgagaaactttagagtgaaaggctggagttgccaagttggagatgttctaactacaagaaccaatgcaggcctgtggcttggtttcttttgagcagccactcccatgggaacaggtgtctgacttgagccatcttggagcggagcctccatgaatgcattccagcaaaggagactggggcaagaaaatgtgccccagggcatggattgtaatctgtcatggatctcatagacccctttgagaagccatggaaagctataaactctctccccaggaaaatatacctatctattggtgctgacacacacagttttccagmgatttgtggctgacactagggtaagaagcaatgtgctatggccttagaggggaagcctgctgactgcaaaagatcctggcagtgggtctgcataaatagtttggatttggggagaagctttgtgtttagtactttgtctccttttccctgtgacagcagcagatgaggcagagaaggtgagcaggggcccaagggaggttgcagtgcgcagggaagggaagtcccatcagagagtcttgaacgggggactcaggaccttccggagcagatgacttgtcaagatgttagttccttctgtgtgccatggtccaagagtgtcagatggatctctgtgggcatggaaagaggaccttgcacagaaatagagtctccttggagttccgtgctggttgtggtctgaggcatgaatgtgggctttggagccagggttcgaatctcagctttgccacattctagctgtggaatgttgggcaaggaacataatctctctgagcctcagtgttgtcttctgcaaatcaagtgctaacctctcagatttggggagggccacaagtaaacgaggtcatgtatgtggcttgcaaataaatgtgagctctactcccttaaaatgtcaagaatgaacacaacttctccataaaaatcagagaatgctccgccttgttcgggaggggtggtagaaagtgggcagaggataagaactaaaataacagtcataacctctctgtcttattaagtacctttgcattttgttccccatttcactccatagagcrtytcctgaatgaagcagattaagttacagttttctgattagcatgtttttaaaacaatagcttctcctttcttttccgtcaactgtgctcagacacctatcttagctctgtattaagttgccaagtgactcacttctgaaagggttttcttttcaaatcatgacttgtgtgtgtgtggtggttgtaatyacaaattgttgtcaagcccctacatcatttgatggcttgttggtgtctgaggccgagacacagcagaaataccacaggtctagagaaaggcaggagaaatcatcggaggcccacgcggggcccagagaacataccagtcggaaagaattagatcctaaactttgcgggcaaggagaaacgttgacacggtatgtttgaagttcacaaaaggataatggtcccgaaaaatcccttttttgcaaaccccaktgaatttttagggttagcaatgaaattataagtcaataatggataaaagagaaaatatgagagttagccttcaggcaatgagcttagtcaattccaaagagaggattcggggctttggaatgctttcttaccccagatgtgtgccagacaggtggtcgggaaggcggcttgtgttccacaggctggcatacagacatcaggggaaagtggccaagtcgttcagatgctttggagagtttggggcgtcatgggggtaaagaagccacatagccagctgggctgggtggcctctccagccccacacagctaaaagtcataactaactgctaccatttaatgagaagtcctgagtgctagcccctgaactttccatgaattggttcatctctggaaggaccccaagaagtaattcctactatgctcccattttacagaaacgaagctggaaaactgggcctgtcccaagtcatacagctgatgagtggcagagctgagctctggattacagactggtttccgtgtagccagtctcctgtctggggccctgggtgaggatgagatttctttggttcgtacagcttcagggacatggcttttcctgtagggaaaggcctcttagaccaggcacatgtttgctgggtggagtgtaatggactccacgtgtctctgaaactccaaagaaaggcagctataggatctgtggtcactattcattggaaagacacccaggtactctcccatgaattcagatcatgtagcaaatgaggactgttctttgggatcatctgtcatggagatttttattctgatatccactagcccaagagatatgggtcaaaaatcattgctgtgaactccagggcatcattcattgtgccttgctgttctactcgaggtttggttttcctaacatatcatttttgagcacctgtccagcacaacctcatatcattatccctgttttatggatgagatacaaacccagagatgttaaaatgactttctggccaggattggggccaggtctgtctgactccacattcatcacaggaggcctgcttaactgtaaataaggcgtggactgtcttagaaatctcttcttgctaggattcttagagtgatttggggcccagctgggctcagccataatggaatttggcctctccaagcccagaaaccagaggacaatgtttgtcaagcttgcctgcttatctcagcccatccctagaaagaagaaagacaaaggcttctcctctcccctgcaaaggaggtgctttcaattaaaacaatgtttacatttctgggcttttaaaaccctagaactctagaatcttcccagggatagagccacaaaacagtttgcataggtcagaagttgcaaattggcagcttgaaatacactctgctcacagctcaagtttaacttggtggatagaagattgactccaagagtattttagttttattttaattgcttggccacatttgaaaatcggaacacagaacatttcccattaaagatacagattcccagcttttcttgaaaatcagacatttgagtagcattgggttcacattcttggctggcaccatggagaggggtagccaccgctgctgttattagatgaagtttgaggccaggcatggtagctcatgcctgtaatcccagcactttgggagtccaaggtgggaggattgcttgaggccaggagtttgagactagcaacatagcaagaccctgtctctatcaaaaaaaattttttttaaattaagcgggtgtggtggtacatgtctgtagtctcagctacttgggaggctgaggcagaagcgtcacttgaacccaggaggtagagattgcaatgagcagagaaggtgccattgcatcctgccttggcaacagagcaagactccatctcaaaaaaagtttaaaaaaaaaaagaaagaaagaaaaaagaagcttgagtttcccagatcctgctcctctctctttctttgattcttttattctttttttttttttttttgtagagactggtttttgctattttgcacaaagctggtgttgaactcctgaccttaagtgatcctctagccttggcctctcaaagtgctgagatgacaggtgtgaagcatcatgcctggcccccatactatctagaactcttcctcttgaccaatgtgcattgtctgcctggttctgccttactgcacttctctggttattgctcagaaatgctgtggatattgacttaycggaccaagtttgggatgggcaagtgaccaggctcagcatccgattaattcaagcatccacacctgcatgggctccaggaccaaacaaggtcttggacaggaagatgggagccactcttttcaaagcctccagaatgccagtctctttcgggcctaggagagactgaagaggcattcctccctcttactgccatctacacggtcttagggaaaggggagggactgattttcactgcaaattctcatagatttttttttaactgatctgaagcacaaatccaactcattacctttagcggtgtacactggtatttagggaaatcaggtcgcaggaaatcacatgtgtatacaggcacgggtatatttatattttaaattcattagagtttcctaaatgcaagagcaattctgctgtcacagagaaacagcatggcagaatatttggcagccgggattttaaataaaacatgctttttcttcataattaatataacaaggtttcctggcttaggacttggcaacgatcccaggaaaaatggttgggggggagggggttggtgcgccatgcctgtgacccgcaaacaagttccaggaaaagttgatgctgagtaagttctccttagtcggctcttccggcactctgagaaaacagaacaaactcactgacaacagtggctattaataataggagtagtaagagtaatcgtaataattaatagtagcagcaaccacgtatgaagtctttacatttgccagatgtggcatgctttatgtttattatctcatttaagcttctctcaaaccctatgagttagggaccaatgtcattctcattttacrgacaagaaactaagcatagagcagttaaatcatctactcaagatggcacctctgggaggttacagctctgggattcaaggtctgcccaacgcctagttctatgctcacaagcactgtggttgagatcatcatgcctggcactgcccaaagacaaacaagaccgttttgtgtggtatcaaargtgtcaaaatgggcagcagcctgagactccagcttccagcaggagacaaagtcgctcccatctggacgttccctcaatagccccgaagctttgctttccctttgctttccgacaccacaaggatcgagtcttgccggctagcaaaccagttcgttcagtgttttcaaaacttcagtcatgaatgaagscatcttcagaaattctgccaaagcccaaattagtttcttaatacttttgttaaagactcaccttttctctacctaaattgatttagttctaaaggaaattgtcattactacaaagaaagcgaagtgatgtcattgaattctagctggctgctgttgacatgctaaagstctgagcctgaagcggctttatcctccttagaggaaagatcagcaggaggcagaggatagagacaccagcacccsccagtccttccccctggtgggattggaaggcttgacagtcaacctgagaaaagaaagactttctcacgctgtgttttctgttttattctaatgctgttacttcrcrtcctggctaggcaccatctcaatcaactcagatacccgcagtggctcacrtctgatgccacggaaagcrcaggagtgagcacagcttcagcagaggtggtgctgatgcctagcgggggagttaccttcctgaagccctgggctatttgctggggctgactgaccaaaaagggaaacrtgggggcttgtgcttatgaggcrgccccacgctcagctgtgctttggttttgtccacttgcttgtcttaattttttttttttcttagacggagtctcgctctgttgcccaggctggagtgcaatggcgcaatcttggctcaatgcracctctgcctgccaggttaaagcgattctcctgactcagcctcctgagtagctgggattacaggcaactgccaccacgcccagctaatttttgtattcttagcagagacagggtttcaccatcctggccaggctggtgtcaaactcctgaccttaagtgatccacccgccctggcctcccaaagtgctgggattaccggcgtgagccaccgtgcccagccttcgcttgccttttaaaagggcttccaagagcattatcatatgcagaatttttacccagtctccttgtcttggatggcctcactccctaaccttcaaagctcccctccaccaccatctgtttgcaccaagtccctgggatgagccatttgtacagatatttctcaccaagtctcacctgcggagtaatcattgcaaatgccatattcttcctgagcagccaaagttccttgaataaaacattggaattgggaaagggaattcttacttttataattggggaaactgaggcacagagagactcaacaaattgcacaggagcaaagataggccctgagtctcctcagccagaagcttcacacccaagagagcttggtataaccaaagcgtggccaagggcagagtcgcctgggcactggaggaagatgtgtgttgtgttcccagcccacctcagacccatggacgccaaacctctgcgggtgggccccagggatctgtatttttatcaagttccccagacaattcttatgcacattgaggtttaagaaccaatgtctttaaaatggaaattctccggwtgtaacaaatgggactcttctctttctgcccattgcccctgtcccatctctgcctgccactgtcacacgaagctgcagctcagcccttagctgggtrgggtctgagtggccagctctgggctttagagcagggaagctgcacagaatccctctgagccaggcataggtgatcggcgtcagagccaggagacytgagcctgagtccctcccctgccccaatgygtccatgtccttacacaagccacttcaccatgctgggcctcatcttcctcctctgcagatgaagggtctgagccagttcctctctacagtggctcctggctcatcactgtggtctggtgaacagcttcacccaggtgtccaggaaggaaaccacccacaggcactgctggccagcaccttcacctttggcttccacattctcccttgagagttttgcccccttcccctgagcttcaggtgaaagcaaagctgcagtgaacctgccagtcttgagacagcattgagcaatgtgtgcaaaagccagaagggcaagattcctgtgcctacgaagggatggagttgcaccacttcacacctattaggatggctcacttcatacctattaggatggctatcattttcgagaatggggaataacaagtgtgggtgagaatgtggagtaattggaaccctcaggcctcgctggtaggtatgtaaaatggtgcagccactgtggaaaacagtatggcggtccctgacaaagttaatcgtagaactaccctaggacccagcaattccacatctaagtacatatctgaaagaactgaaagcagagacttgaacagaaatctgtacaccaatgttcatagcagtattattcacaatagccaaaaggtgtaaatgacccatgtccatcaagagatgaatgcataaacaacatgtgattagatagagacaatggaatactatttagctgtaaaaaggaaggaaagtttgatacatgctacctagaagaccttggaaacatgatgcacagtgaaataaaggcagtcccagaaggacaaatattgtaggattccgcttccatgagatacttagaattgccaaatgcacagagacagaaagtaggctagagattagcagggctgagggagaataagaaggaggcgtttctgttcaacgagtacagtccatgctggggatgacgaaaaagtttggggattagagagtggtgatgggtacacagcattgtgaatgtaattagtatcactgaaaggtacacttacaaatggtcaaaacgataaatgtgatgttctgtatatgttaccacaattttcaaataaaaggactgagtggcttggcacaactgctcatcttagtgtcttctaggataaagttggttagacagaaagtcaaggaggggcagagagagaaggagcccgtgtctctgaatcctactgatttacagtgtaatcttcttgggggtggggagtgtatacgtctagtctattttgtcctatctttaatccagtgatgatttcaactcaggctgaaatgacatcgcttatctttgtagcaggagccagagaagaacaacatgagggaggatttggcctgggcactggcagccactgccctctgccacctccactactcgctctggccttgagctctttgcccagcaaggggactggccctgctgaactgtgcacacttgtccctgtccaccttccagtccagaggttgcagcctcaaccatggccatggtacagaggtctctcctccccagctgcccttgggagtaacgcacctccctggtggttggcaacatgtggcctaccaccaggcatagggtagaacatgcaaggaagaagagatggtgtgattagagtcccaaccttttatccagcaagcagaagatttctctgctcttagttcattctgagctgagcctctgtccccaaaagacaaatctggccctatctcccccatcactgcctcctaatccctctgagaacattttctaccaacgaatttctggaacacatcaactcagactgttaggctttttgttttgtcttccagaagttttggaattctggaaggcagaggaagaatcttagttgaaataatcactggattaaatataggacaaaatagacttgatgtatgtgcaccccacccacaaggagattacactgtaaatcagtaagactcagagacacgggatccttttctccctgccttcctcactaaccaaccttaacctgggaggacaccagactttgagactctggtggcttagggagtttaacattgctaagggcctgctcctaaccttgaagtcagtgtcctgagccagggatccattgagaaagcccaagtgcggagtagaataaacagtcgttggatctagaatggtcttgctaaatatactacaaagcagctaccttaccatgtgcagaagcagcagcgtccaccctttaagagaagacgggtcagctgggaccatgtgctattttagccctgttgaaactaggaatggatgtggtgggagaagtgggcagtggcttacgtgccttttgatctgagtgaagatgtttgttaagatgtgtttaccgcagtaggctggccaaggctcaatctgacttttgtactttctccagctgtcactggggccaagtaggccctctctgtggcctgccaggcctaggccagattggataagctttttttttttttttttttttaagacagagtctcattctttcacccaagctggagtgcagtggcacgatctctgctcactgcagcctccacttctcaggttcaagygattcttgtgcctcagccacccgagtagctgggactacaggctcctgccmtcacgcctggctaatttttgtatttttagtagagayggggttttgccatgttggccaagctggtctccaactcctggcctcaagtgatctgcccacctcggcctcccaaagtgttgggattacaggcgtragccactgcgcccrgcccacarataagcctttttataaagcattccaagaacagtgcccctgattttgaacctagctcaacacctgcctctcaaggttaatgagcttttctgtttctttctcctccatccttgctttattactgtgtacacgtggcagcttcctggtccctcacaatggtgactaagagcaaggactctgatgtgagactgacagtctcctgttctggctccagcatttcctagttaagttattttagacaacttaatatctgaaaacctcagttttgtcacctctaaattggatataatcataatacctaaattatgaagtattgtgtgcaacaaacaagacaaaatgyccgtaaaatatttaacacagttgatggcacattgtcagctctaaaggaatgtgaactgagataacagttttctccytagttatctcttcctcctactcttccatcgatctttctctttgaatgtgcaagtctcaggagtaagggttcttctatcattttcttgtctctgggagaagagataatggaatgatggaatgaaaggaggcaaatactgtgtccacccttcccacctaccatcatccaggttagtttcagggatccggatataggcataagtaattgactatcagcctggactttcccatacggtccctaaatatccagccaggtgttcggactaccagtttccacattgcaccacggcccctctctgtgggtggacactgtgagtcacaaaatgagtgacttgcttcagattccggcgaccccctgacaggcagcccaagctgcacatcggcttcaggctccccgagagcccagcccaggaagtctcggctttctttttgtttggtttccctccgagcgccagctcctaggaagggcacgtctgccacctgctggctgtaggcagcatggcacccggctgtccctcaggctccagctggagccaggatgcgcaatgctggcccrggtgcaggtcctggagggcccttccttgctggaccccgaggaaggatgtccctcaaagtcttctgcccacttcttaggacatggcccaccctgttcggctcaaagagaagaattcgtagggaatctccaaaggactgggtggagacaggtctagacagacaggccctgccctgagaaaggcaaggcagggagcaaagaccaggaccaaggcccagatgactgggggtgatgagggcgagattgaagaaggggtaacctttgtccttgaagtcttagtgtattagtccattctcatgctgctaataaagacatacccaagactgggtaatttataaagaaaaagaggtttaatagactcacagttccacatggctggggaggcctcacaatcatggcagaaggtgaaagacacgtcttacatggtggcaggcaaaacagtgtatgcaggggaactgcgcattataaaaccatcagatctcctgagacttaatcactatcatgagaacagcacaggaaaaacacacccccatgattcaattacctcccacatggtccctcctatgacacatgggaattatgggagctacaattcaagatgagatttgggtagggacacagccaaaccatattagggtcccctcatggcacctctctggcactcaaccccagaggtacccatttctggcaatccttcaccctaagcccaggagcacccctaaggcctaagctgcccttcctctgccaggcctccccactgccaacccccaccctcagccccaaacagaacacctgtcccatctcactgcctgcagaaacagggtgtgggggaggtggttagccaggaagtcattagacagaggcacagtccccgataacaaatgacctctcttcctttttttgcattcctttcccctcaccaacatgttattttgtaattttttaaacctacagaaaagtgggaagaataatgcaatgaatattcttcatccagatagatgccacaattgttaacatgtcgttatrgttgctgtgtctctcattctcctgtgtgtatagttgttttgtttgtttgtttgctgaatcatttgcaagtaaattgtagacatcactctacctcaccacgcatctctctcttttktttttttcttagatggagtctcgctctgtagcccaggctggagtgcagtggcacaatcttggctcgctgcaagctctgcctcctgggctcaccccattctcctgcctcagcctcccgagtagctaggactacaggcccccrcygccacatccagctaattttttgtacttttagtggagacggggtttcactgttagccaggatggtcttgatctcctgaccttgtgatccaccyacctcggcctcccaaagtgctgggattacaggcgtgagccaccacgcccagccagcgtctcttaagaataagtacattttcctacagaactacaataccattgtttactctcaagaaagtcaacattgacacaataatattgtctaatatgtctatattcaaatttcccacttgtttcagtrtcttagtccattttgtgttgctacaaaggaatacctgaggctgggtgatgtattttttttwwaaaagaggtttatttggcttggatttctgaggactggaaagtccaggattgggcagctgcttttggcaagggcctcaagctgcctccactcatggcaraagggaaaggggagccartgtacagagatcacatggcaagaggggaagcaagagggagggatggaagtgccaggctctttttaacaaccagctctcctaggaactaatagagtgaaaccttgcttaccctgagggwgagtactaatccattygtaatggatccacccctatgccccaacattgaggccccacctccaacattggggatcaaatttcagcaygaggtttggagaggacaaatatccaagtcagcmcaaaccacagcactcaatgtcctttttgccattgtttttaaatccaggatccaattaagagtcacacactgcatttcgttgccatgtcctttactaaaaatacagtcctcccatctttttttgtcttttatggtgttgatgtttttctggaggctaggctaggtgttttgtagaatgccctgcaatttgaatctcacaatttggatctgtcatgttcctcatgagtaaattcagggtaactatttttgccaagagtactatctgttgatattttacatcctcagtacatcatatcaggatgcattatttctttttatttttctttcctaatttatcatctacctaattcccaaaatcatgtaaggaagcctacagtaaaacagaaaattagaaattctgcagagggtagaagcagcaaatayaccaaactgcctagcttgatgtatctcattgatctcagctttctggcggccaagacccaaagggaaagctgtctagtggtagaactcgcatttctttaaatcagggttcagcaaactttgtaaaatgtcagrtagtaaatgtttggggttatactttctctctacaaaagcagccataaacaaacaggcatggttgttttccaataaaactttatttacaaaaacaaaactgctaggcttggcccaagggcccttatttgctgacccctgattaaagtggaagasagcatactscagttattaaatgagtaatactttctttttcrggttgagtactgcatattaaaggaaatatttatgtcattatttatttattcagcaaatctttttgaggaatgccatgtgccaagctctatgctaggtattgggtaatacatcaatgacaaaacagacaaaatccctgcctttctggaggacagagtctgatgtgagagacaggtgacatgcaaataaacaaatgtaaatctatgcactgcagtaaggatyatggagggaataagcgggtgcagtgacaaaacagtggggatagggaaatgtcatattgatgggatatttcagggaagatgacacttaaactgagacctagcgaaggtcatagaggggggcttccaggcagaggcaacaataattgccaaggccctgaggtgggaggaatttatcttgcgccattttgaagccaggtgtggctgaagcttagtaaaggggcaatgggagggaggagtatgggaggagatttgtaggtcatggcaggtgtttgcattttattctaagaacaacgagaagccactgaagggttttaagcatctgtccatccccaatccccaggaactgtcacctgaagaaatcacctagatttcarcatgaattccgaatcctatcacagctatgtgacctccgagtccaaattttctcatctgtaaacaaggctgatgcaagcctcttcatagggctgttataagtatgaaatgcagcaatgtgtgatcaggcagggagtagatgaaactcactgcamctgacgagcasaccagtacctgggcagccgtgttccaaagcaaggacaggtgcagacaactgacacgaacccctgctgtggagaaggacaatgcttcagtrctcagcgsgcacaggtggtggtggtggaggrggtgtatcttcaratagaccccattgcccctcccttcaacctctagcccagccacaaccatcagaaagcacgcagtgcacctgcaccccatacgatctcctctggctgacagctaaggagcrcgcccggragagctccatctcaacgctgatctgctgtgttgttttgtttttcagttctccctgatgtctttattggaaagcctggacccaggtaagtgtgctgatctccctggggcttcccaccaatcccaggctggttctgggctggtgaaaaggaggcctaagtatggaagtgttggagggacctcagggttcaactggttccrggttgtcacaggcacctttgagaacttgccctcaaaatttgtgcacccacaatgctttacacaattttgagtttcctgtggacacygmtragcccaggctcaggatcccaagggaaatactgcctacgtacttaaaacccttgattttataaagaactgaggcctagaggggaagcaatttactcctggccacacagcgaattggaggctgagatgaggtgaaaggctgaggcaaagtgagggcgagatgaaaaatgcatggctccaggcaggccgctccacctytttytgtgcgagggcggcctccgggctgacctgccctggtgataccctcacaccagcacctctgctgttgtcttctctgcccaaatggtttgcttcctcaggctcgacgcgtctaccaccaggtgggtcctgtrtcttcacaagggctctctgtctcacagactcgctctcttattgtctccctttcctgtgtcctcggccttgtgcccacagcgtgcgcaagctaagcagggccaccccttccacatcatgcactcctagtcctttggctctgggttcgagtctccctttgcagctctgagccgcagtggagaaaattctgctcgccactccatctggccagaggccaacaaccccactggtagagatctatgctggtcacccacagagcgccatagccaggcagacaacacatggagactgtggccacatctgaaccttgaatcaaggatttatttggcacaaagatggcagtaactgggccaaagtcagtttgacagtcaatattgtccagcagcaaaccctggatgggcagaaagatgaggccaggtcttcattctgtcccaggtgctcagaggatatttgtggagttgaagagaaatatatattggcatggtgtgtggggttttgagaaaatccgtgtctttccccaacacgaaggatattcaacgacacatagttcagttcctctgaaggcgcgtatttcagagagttatcccctagctgatgaacacaccaccacccacacgtggagtccagggaggagccaagaccaaggggctggaagggtggcctcttccccagccttaagcccaaattgctcaggcaccgctgaaggggatccctgggtctgattttcagagatacagggctgtgggagctatggggtgacacagtggaagaaaaagaagtgcggaagactcaagggcccttgactttactgccagctgccagaaagttgtaagagacatctacagtgagttcatgacaccctggaattgtgcagtgaacaacttgagcaactgtaagcagtggccctactgaacagagaccatggaaagggagtggagttagccaatgtgcccatagatttatagctttaatcaaacagactgggagctacagggtcagatttgatctgcaaacaggaagaactttctcactatcagagttgttcaaaaatctgaatgggccactgggctctyaggaggtaatgagtttcccatcactggaggctttttaagcacaggctgaaaaacctcttayagggagtgaagagtatttaatttaaccctcaagaaactaccttcagacagtttggtatataaatgaagggaccctgaagcagacttytcctgggatccagagtccatctcgaggtgtcatagcctccagggagtgggctgagwtgtagagattgggcctttttgcaaagagtagattcagtttaaaaacatccctgttcagtgtccgacttaacctctcacaggggttgtgctttgatggtatttgtcagctccctgctggctctagacaacagcatggcgaaagagaccccgtgctcgtgcccgtgggcaagttgcttctttggttgatcttgctggagacagcgcacggtgagggccttgctggagcagaaggtgcgcattccacagtccccartgggtggtggaggaggtagccagcaaacagcacagactctgccaatctccccaaagcaggtgccacgacagccagcaggcctgtggaaatgcctcttcaaagctggcttggctctgcccagcaatgcaggctgagcccatccatcagctgtcctactgcctgccagcgagagtgtctgctgggcttgccccgccagccagattggaagtgtcaaatgcaggccgacagggctggggtttggaggaggccctcagaggagccgtctgtgccacagtgatggatgacaccaacagggacgacattccggggattttgattctgttccacacatctggcaagctccttaaccagagcagctgcaaagctcccatcgcaggaactctgagcattttctgagagaccccaaacatggactgagttaatcctggtcaagggacctggagcatgtgcttaagaaggtttcccaatgcatgctacttcctgaaagctaaaacccaaggactttcatgaaacccaaacctataagagattccaggatcgtaaaaaggcaaataaaacttggagttaggtagacctgggttatgatgtcatctcatttggccttcatttttccttatctgcaaaataggaataataatacctatgctatagggttgctttaaggtgaagtaagattgtgggcaaccacatttatttagtttagtgtctgatacatagaaaatactcaacacattataacctattattaggataatttggcttaactcaggatactctcatgatycttcctgataatttctagaaacagactgaaaactagacaaactcacaagaatttctttttattcctgatagaaaattcttgaacagctgcccctttctttcccaaagctcctcccttttctatagcctagagaaagtcacaaataatctatgtttmaacctgaactgtttttctacaatctaccagtggaaccaaaatttatggcaggctactgtgcctctctacccaggaaaatatgtggacgagtttctagatygctacagagctcatcaggtattttctttgccaagtacatttgacccatttcttacacagtttcttactgaaattccctatttgctctgctttaagcagacaccatttttttagccagcaaagctgcatgcaggccaatcagaaagcagaaaggcttagccactaagggaaaaataaatccgtcaatcacatacattaactacaggtagggctttgtgctgggcactctggggttaaaagaggaatggaaatggcccttcctcttaagaaactaactatcaagttggaggaaacaaataagatagaccaaatacccaagagaggtgccatctgaggtctagctatgacacttaaaactctccagccaactgggccacagaggaatgctcttgaaactaaaattcttatcccattagcaatctaatatcaatcaagccctgtgtgtcggtttgttattattgcataatacgctaccccaaacttagtagcttaaaccactgaccatgtatttaggtcacaattctttgggttgacaattttggctgggttcagctgggcagttcttctgggctgcatcgggctcagttgatcttgactgggcttgctcatgtgtctgcagaagctggcagattggctggcctcttatcttgctgaatattggctgggctttcttatatgtctgaggcctcagctaggaccactaggccagccgttgtccacatgttctcatwtgctcttgcagaataggccaaactgttcacatggcagtcatgtgggtccaggagtgggagagatacagagtcgagagagaacaagacttcttaaggcccaggctctgagctggcacaccgtccttccatcacacatgctattggccaaagcatgtcctaaggccaacccagaaccaaggggcagggaaactgactccatctcttggtgggagaaactgaaaagtcacattgcaaagggtgtgggtgcaggraggggtggagaatcaagggctatttttgtcatcagattggctcatactgaagcagagtttcactgtggaacttgagggcgccaggcctagacttggtcacttctagctccctcacctcttcactactctttaatctccttccttagctggctttcatcccccacccaaccttggctggaggcttccttgaggacaaggccacatcctactcttatttgtataactctgcaccattcccaatgccatcctgmacctggcataacacttggtccattgtaggttcacaagacaagttacatatgcagacaataggattaagtgccaacataatgggaaagacaaaataaggtttaatcctagaagtggagaaaccctcccagatgatactcctgtaaagcaccttcaaatcacatggcagcccatcccaaatggaaaggatctttgtgactttccttgcacagccaccagctggatggcttcttccaccctggctacctggggccactgagctctgctcgttmtatccatcttgactgaggcccatgggccctagagaataggaagcctttcttagcagsaatrtgattcaaagcctatgtattttatttcttctttggcttcactgagaggtaagcagaccttgttaataggtctggattcaagtcaaaatcctctaacagacatttcattcatccctcgtcacctggaaaagtcacaccataccatctacmtcagaatcttccccatttctaaatatctgcaaaagaagtaattcttaatggccttgccaagattagctggtctgactgccaacctgtgggagagatgggagaaattacagaagcaacctgaagggcatttatctataaacatctgttggaaaaacaaaaataaattcttcaaagaacaagaaataactaagcaatgcaatcagctccttatcaaaccccattgtctctcctaaatgtcagtttgaaatctttcatgtcaaactcagaaaaacatttttttcctcattttctccctctctttctctgctttatcacgctagatggaggaaaactttatttgctccaggaagacaatggccttatcttcaacctggatcctcagccctaaaaaggtggcctcccctgggagcattttcatagtggggaaaagcacttcgggagaaataatgagcaagccaagggagtcttgacttgacactgtgataaatgaggtgaaactttggcaagaaaccagagttggcgtattcaaaaaagaaataaaaagctagttccattttaatgggaaatataaaacagccattgtgcaaaagtcgatttttcaaaagccagagagataaagactctaacagaatgactgagagacgagtaagataatgtggttgataatcaggcttaggtaaagtgccatcctccaagccatcagctggctccgtaggagtgccttttcaagtcagctatctgcatttgctcgygcctcattatcatatgcatctctggacagcttccttgcagcttcaacttgccgacttgccatactccagccggctggagagagcaaagtcaacctgactttcttcaaatcccaaacttccacagacctaccagccacagagctaccaggatctccccgccaaggccccagagagcaaagagcttgagtccagccaaccttacacataccwgttttttttcccaatgaccagtctagtgtgaggtttacaactgtaggcaagatccatgaacttttataaggttatccttgggaaattcctaatgagcaggctggatagtcaatggggatggtgggacacattttcccaagggtaagtgtgggagtacccaaggcaatgtaagaccccagttgaaacagttgagtgctacagttgagctagtgagatttaggggttgtacggagacaaactgccatagttcatatcctgccctttagtaastatgtgwccttggccaagttactcaatctctgtcagcctcaggtttctcaacttagagtgaacaatacacctcctagatttttatgaagatgaagttagatggtrcatgtaaagtgcttagcacagggcatggtacataataaaggctcaaaaaatgttatctgttaaaatgactctgtagataatgcttgaccatgaccaaaagaaaaatgatgagttttctttgatttcattcagcttggtgactaatgaagtcccatcaagaaatattatccacaggatgaggcaaccaggcactcaagtatagtgtgatctgacccygggcagaccccatgtaggaccctgtagacgtgctaggtcccartcctcttcctgctgttcaaagatgagaaaatcaagacttgataatacagttggcttwcctaagttcaagggagtagaaagctggacttcgcttcatctcttcacttccaatcaggtgctcatgaccctgctaaatgtcaacactaccttgccgggtcatagcgtcccccaagtgaaaagatgcaaagcctgagccctcctttccactcccctcactgtgcagagctggagagacacatgattcctcctgcaggactttgaattctttggggaaaaggtgtccaactaaataaaatgctggcctatttgagtgtaatgattaggatttcttctgtcctgttaccatccctgcagactggacccctgaccagtatgattacagctacgaggattataatcaggaagagaacaccagtagcacacttacccaygctgagaatcctgactggtactacactgaggaccaagctggtaggtaccaaatctctttcagggactctcctgggagaaggtcagagcggagtgtatgtgggaccacatgcaagggcctctctctccgcctctctggccagtattgtgaaatagctatggaagaaattatttggactggctyttttttctgttagattcatatgctatgaggactggggaagttcttagagaccatctcccctaccctcaaatgacagatgaggtaagtgaggctaagagaggagctgacttggccaaggtcatgcagcaagttaatgcagcattgtccaggtttcctgatgctgtgaatagcagctgtattcaaaatcactcccatagcttagattacaggtcagaccctaaggatgcaggaagtccatgtcagccttgagtaccagactgtagcatgtacacattcagctttgggactttccttccctcatgcctttgccagaacttttccttcccttccactttttctttctcccttcactctttagaagctttccacaattgttagattgtgtgtgtgtrtgtgtgcatatgtgtgtgtgtgtattcatacacatgtgctcctaccacacttgtttttgtttttgtggcttcttaacccaagcagtgggacagaaaagaaaataagaagctgggtccaagcaatgccatgtgactaaaccaggagaaggaatggaaagcacttagcagctggaataaaagctgtgtaactgtgcaaagtggcctggaaggcagggccaagatacagggcatgggggaacatcagaagggaccatcaaaacaagagcagggcccagggatcctagttcctgaaccaaagaacaatgtgtgtgaacagaaggataaagaattccccaagggaagatccattcagacaaccatgaaaagccacaggcacagatgaaatatgacaaaatctaactgaacaagtagttgaagaaagatgaaggccactgggtcatttcctccttgccgccaattcttctgtcaccctcttgcctttggtcttctctcctgatgttcagaaagcttgcgtttcattaggggtgggttttctttccccactcctgacctccacccctgggcactggaagtaggggaggtcttcaggcttgtgaaataccttcagcatcagagacagaccctgtggcactcccagcaagactgggaggagaaaaacactgatgagggaaaaggggagtttctcaatgagaaaggccccgtccaaagccaggccgaggggagacagtcktggttccttctsgcctctcctctcactaacmtgaatccctctctctggtcaggtgactgcagttttccttgctgtttagggacaacatatgttttcctcctttccccagtttctggytcagtagttactctctcatttggggcaggagactgaaatttgatgaaaaatttggaggggggcgcttctcacctgcctttccttaccaacattgccttcttcctgtgtgtcttagatccatgccagcccaacccctgtgaacacggtggggactgcctcgtccatgggagcaccttcacatgcagctgcctggctcctttctctgggaataagtgtcagaaaggtgagtccgtcatcactagtccactcttccctctgagttaaacaagaggcagtcctttctgtgtgagaaagcactgcgcratgccatggaaaggattataactgcaatactgtatcatgcatagtgtattcctctgcagggtcccaggcagcctctcactggatcctcacccctgcactgtgagatggaactagtacatccattctccagatgggaagaytgaggctgagaggggataagggctggactctaaccaagatatatcccaaactcaggactttgtgcttagagtttagtctaactgcaacagagccatgttgtcctcaaatgggagagcagggaggatctcagggcacatgagacccaacccagttagagaaagggaacccagagagtgggggcatttgatcaaggtcacacagctagctagatgtagagcagaaattagagccctcgtgcctgacttctggcccatgctcattcattctaccatactcactgtgtctgctgccagtgaactcttgtgggcataacatgaggcagtggaataaagcatcaggaataggactcctaggggctaattttacccctagagaaaagctgkattcgggctgctctagcaaccatcttacttcgtggagggaagtggggccttaggtatatgtacagctttgtggttgacttcttccctcggtgccctcttcacttattcttttcattttcaatcctgcaatttcttcagtaaatttttcaggatggttgagaatatcgagtataaacacagtgtctgggctcactcctcaacttctcagaaaagtgacaaaactgtaaatgcattctgaagttagctagaaaatggagagactaaaattgcagctctgtttggtgaaggtgtaacaattatcaaagtttttttattaagatataaaaattaagactatgggcatgggaagcaatgtgggagacaatcctccatgacccaaaaattagacagmagccttgtcctggcatagcccagtgtttcaggaccacggacaaggctacagacactgtcagtcaccccaccctcaaacattgttttatacatgtatccctctaaggaaaatgtgccccaaataatgtcttatgttatggatctcctacagtgcaaaatacgtgcaaggacaacccatgtggccggggccaatgtctcattacccagagtcctccctactaccgmtgtgtctgtaaacacccttacacaggtcccagctgctcccaaggtaagtggtggagrccccttcgacgctagactttctgtgccctatcttgtacctgcacccttctgcatggaaggccagatgcatctgatgtttttgtggcaggcacccaagatggtccttttccctaggctttctaaagattcattatccctggattgactccacccagtgggaattgactggtctgtgtcccttcccacccaaaaagaatcatcttgaaactcacttcttccaggaagtagaccctgatctattcctgagagggaccaagtaggggaatgaatacatatcgagtccctgctgtgaggcaggcattgtctcaggaaatttacgttctcttttgctttctccaaagacacctcaaggargagctttacagatgaagaacctgaaatgtagacagattaactcatttgctcatggccacatgggtatcagcaggcagagctctacctagctcagacagggcccaccactcctgctccgtccatgcttctttgtttccttactgastgacccatctacttatgcacttaggcatggcctccagccagattgcttcatccacatttgcttatgttcttaaggcttctgtgtacacttactagagtgtcagtggatctgtctttcccatctggtgacccatctttcrcgaaaggwtggacaccagtagaaygccaccaatgtctccttgtcatctcagacatgggctgcaactccttctgaagagccttcctggccccattcctgtgttcacagtggttcctgtatgcaggccaaacccctgccagaatggggctacctgctcccggcataagcggagatccaagttcacctgtgcctgtcccgaccagttcaaggggaaattctgtgaaataggtatgggtytctgccaccatcagggccacaagtgaggcctctggaaccctttcctctctgggttttgttgccagaatgwggttcaaatcaagtttcccaaactcgactattgcctcagccttctcacctaaagggatagggcgtgtctggcttcctgtaaagaaagtaataaactggggtgtagtgcaggcaagtcaaaccacttgggcatccctaggccctagcccaccttccatcagttcttgtgtgagccagaattaaagaactaagctcccacaccctacaaccactatatttcatgttttaagcaggattaaatgtgggacattcaacacttttttttctgaaattcgtggtgaaatctcagggcgataaatatgcaggtccagttctctcaccaygtcacatacccaccaagccctttttgggagtggcatgccaatggctgttggttctcacattgctacctgctctctcggaggttctgatgactgctatgttggcgatggctactcttaccgagggaaaatgaataggacagtcaaycagcatgcgtgcctttactggaactcccacctcctcttgcaggagaattacaacatgtttatggaggatgctgaaacccatgggattggggaacacaatttctgcaggtaacatttaccttatttatgctcagttgattttggtcacttattttaaaacagatcrttgaaattcatcagcctcctttctaggaagattttcttactcagcaaggcaatgttatgctgctgtagtaaacaactgccaaatgtcagtggctcaaatacatcaaagtctatttctgggctggttgctgtggttcatgcctgtaatcctagcactttcagaggctgatgcaggcagattgcttgagcccaggagtttgaggccagcctgagcaaaatggcaaaaccccgtctctaccaaaaaaaaaaaaaaaatagctgaatgtggtggtcagcacckgtagccccagctaatcaggaggctgagatgggaggatcatctgaacccaggaggtcgaggctgtagtgagccactgcactccagcctgggtgacagagtgagaccctgtctcaaaaaaagaaaaaaaaaaaagaaaaaatgtctatttcttactaatgttccatgtgtcatgtgggttggtggtgatgatggcaggggattcagctccacaggcttactcaaatattcaggatcagcaagaagagactgggaaatgaagcatgagtttttctctacctcaacctagaagggacacatcctcttcccacacatactttgttggtcagaaataatcacatgagcccacgtaacttctaggcagagatggagaagagcaagtggaaggtctgttgaaggtgatggtctctggcccaaggatgttcaggctttcccatgtgaggctaatgccaccaccctccctggtggtgatctagtttccttcttccttttctgctgcctccaggccactctgttggcttcctgccactaccctttgtctggccaaggccaatgagtcagatgagttgcaggtgagggggtctttgtatggctttgaactggcttcataaatgaggattttttcttgttttttttttttgtttgtttgtttttgtttttgkttttttgagatggagtctcactctgtcacccaggctagagtgcagtggcaccatctcagctcactgcaacctctgcctctcaggttcaagcaattctcctgcctcagccttccaagtagctgggattacaggtgcgcaccaccacacccggctaatttttgtatttttagtagagatgggtttcaccatcttggccagcctggtctcgaactcttgacctcatgatccacctgccttggcctcccaaagtgctgggattacaggcatgagccactgcacccggccatgaagatttttttttttcacaaaacactagtactttccacttgcactcaccttgagctgttccctttgtggagctgtcttcgggggcggggggagggggggcctcttggcagcctttctcagaggattcccatgcatagaattcaaagcctcaggcagaggaacccaactctcaccatgtttatgtgatgattttactctcctgatatagaaaggtcttcatcagggatctcatttcttttcctacaaataatttggtatgtcctgtggatctggcatgagacttgggaccgctttcttgtccttgagattttcctctagaagaaaagattttgccagaaaaaatactataaacacccttctgttctaaggttttgtaacctgatggaggattcaaagaaatgtggtcccagggggagcacaagagtctagcaycttcttatccaaaggttctttaataagatccagtgtgttcatcaagccttgactctgagttgttttgttttgtattttagaaacccagatgcggacgaaaagccctggtgctttattaaagttaccaatgacaaggtgaaatgggaatactgtgatgtctcagcctgctcagcccagggtaaaggccatggctgttcagaagcccagggggtggggggratggagatttgtagggagatgtccctggcacctggtccctccctcaccctgttcttcctccacacctgctttaccaattcccatcccagtgccagcccaactgccyaactgtctgcacccaccaggatgccaagcaggtctggatacctttgtgggtttaggtcaggtagtccaactctaaactcatggtttctgactccaaatcagtgccctcaacagatatttacccatctcttgctgtttgccagccactatgctgggcactgggtgtgcaatggtgatcaaactggctgggctcccatagcctcttaggatgcaaagcattcaaattccagcctcacagtcttcctggccatctgtcctggccccgctctgtgcccacatctagaatgatgtgcccttccaccctgaccagtgggattccttccctgagcagtttcacatatgtgcctttgatcttatggttacttctgtctataacataccatcccatatctgttcttgtccatatacaactattctttgagaaccaactcaaatatcccctcctccaggaagtcctccttgatttctcaagtaaaatgttatctctgcctccttacaaaccctaaggaacaggacaaggcaccacctatacaacatttactgctctctcctyttgtgtcacagtcatctgtgcaaatgtcttatctcacctattctagttcatctgaatatcctcccctctaccctgaaaaagcctccacaattgtaagtgtgcactaataatgaaaggtgcattgatgatgcacatttataattgtgggggctttgtcaaggtgaagtacatacccagtgagggatttgtatatttacataaacataatgtgtgtgtgtacatgtcaatcttaggagtcacatactttgaaatggacaagaaaaaactacattgttaattctatagacttgctttatgttacgcaatgtattcaacaaatatcaactgtgcacctactgcatgcccaccctgtctgcaccagtgcagtctctcagctctggacccctgctcagctsttgggctcagagtcatacctctgcctgagccctgctgaggaactggagggaggctgaatagcacaatttatctttcttgtgtcccacagacgttgcctacccagaggaaagccccactgagccatcaaccaagcttccggggtttgactcctgtggaaagactgagatagcagagaggaagatcaagagaatctatggaggctttaaragcacggcgggcaagcacccatggcaggcgtccctccagtcctcgctgcctctgaccatctccatgccccagggccacttctgtggtggggcrctgatccacccctgctgggtgctcactgctgcccactgcaccgagtaggtgccgctgggagcagggaccagggtggcttgagtggctgggggtgctctccccttcccctctgagcagcatctttgtagctctgtcaggattagggggtctgatctgttcaagggcaaaagaagggctcctgaaagccagagggaaaatagctaccatgtctggaatgtttaccatgggcactgcatttattatatgacatttaatccttaaagctgtctgctggaagacaagctgaggaaggtcagggatttttatctgttttattaactgtaggatctccagtgtcttgagcaggcctttgtacatagcaagtgctgagtaaatatttgtggaggaaaagagtttattgttattccctttttgtaagtgaggatcttgaatcccgggattcttcctttaccttgcctgaagttgtatggaaagttaagtggacaagtaagatggaaaccccattctatctgcttctttgacttcttttgtcctgccctgaatagaggaaagcatgctcctttgtctgataccatcaccaatgacccttctgagtcaggtgtcttcatccatgcctcctgtgtgccttagagaagcaagtaacttctggggagctgaagagtcaccccctcttctgagctccctgtgctcatggtcaaggctggtccaacaaagtctgggttttggaggtggccatgaaggtcttccagttcaccttatagtaaatgatttctctgggattctaggaggtgctcctcaagagaggtcaagcaggcaaacattagcacctgccaatggattttagaagattggttcaagatggcaatggctgtttctttggaaggcctagggagaatgggaggtctcccatgagaagtgggtaaaagttatagcttatatttggagyttgcttctgttaataaagcacttcccttacataatcttatttggwycctaccacagcagagttctgtgagtgagacgagggttacaaatgaggaggctgagtctgcagaaggtcagatttgccaaaggccacacagctgagcagaaacagtgccttcctgaccatctcattttcccttgcagcataaaaaccagacatctaaaggtggtgctaggggaccaggacctgaagaaagaagaatttcatgagcagagctttagggtggagaagatattcaagtacagccactacaatgaaagagatgagattccccacaatgatattggcaagttcctctttcatggctttcctgagggtcttgtcctgggtggatttctctatgaccagaaagctgaagtttggttctagaaggtgctcttgattgtttttggtccctgtggaccctgtgcggtagggaatgtattccagggatttttagtttttgagggtatgtgyaaatgtagataaatgggcatatgctcttaaactgaggggaagcaatgctaggaacattgtgctatggaataggcttggcctggaatcccagcttcccaactttatcaccaggagacagctcacctcctgagccctcttttctcttctatgaaatggaaacactgatgcacaactctcagcttcctatgtgtcaggagacacaatgtgcttgcaggcatgcctggcccctagcccctggcaggtgctccagtgcaaatgcaatgacgttcctagctaccagctgctcagttctgtatccygtttcccttttcatgagacacccccccacctctctctccttcctcaatagcttttttcccctctaatggcctgtttcttaaaaaatggattagaaatgatttcaaagtcaattrtcatttcttgacatgactctcgccctgaagtgttactccttcctgggtggaagttcaaaatatgaaatgaccacggaagaagattttcaggcatggtgggggyaggtggggctttgctgtgkccaccttcwtgagcaagttggagctggtgsttctctgacaaagaggtgacatcgcatccattttctacctctctctccacctagcattgctcaagttaaagccagtggatggycactgtgctctagaatccaaatacgtgaagactgtgtgcttgcctgatgggtcctttccctctgggagtgagtgccacatctctggctggggtgttacagaaacaggtgagtcggccatgcactctcccatgacttaggtgaactacatcaaccagagaagaaaggccaaactcaactgcccttttgaagttgaaatgagtgtcatattcaaaatgcatcaaccaaagaaagcatccacctcattgatcaagctctggttaaattcctccacctgcagggagccttccctgagtttctctgatctccatatctgtccctggccctacccctaaatacttgaattttaccaagcattgaccctgcatttatggagctcttgctcccttcctagttagattggaaagaggaaagatcatggrtttttgagtcagacagactggtattcaattcttgactttgtcacttgaacaactgagttttagtttctcaataatcatacttacttcccgggtttgcaagcatgatcacaggggatgatagaattctacagagacattcattaagtcagcccttagaagatgggggtcaggtcccattcatctctgtctgtctcacagtactttgctcgggkttctccacacagtagacattctataaaattgtgttaaatccagctgttgatttgtctttaggatttggtctaatttttaaaagtaaccaaaggattactttcctcatagtactggcaacattatacccactactacaaaaaaaattcagaarggtatttcatgtcttttccaaatactcaaaatatatttctcttccttcgcaaatcctgtccttaataatkaatagcgagaatcacgataaataagtctgcagaaattccacatatctgaacaaagtgaaatgtaatatacaactttgagtcttttgagaaagatgtctggctaattggatttagggtcagccagtaaactcattttacagccattttcattgtagtccatctgaacttgtcaacctctattctgctcaatatggtctggtcagcatggtgatgtctcagttgggaatcttttggagcctcargttagaattattttgcttttcataaacaggcttctaagactttatgttcaaagcctttatgttctctaagactttatgttcaaaacatgttttgattgatgtcattatctttacaggggaaaatgcctgctctaggaagcaggtagcctactgcgcagggcacttcatccatccatccatccattcattcactaagaattgtgccagcccttttgttaggccttgggaattttaaaatggttaagagagcatctatttcctcctgaacctcatggcctacctggggaaagagaggagggaatatactatctggtccatgtatcatgaccagcacaggattgcaggtctgcactggcatggtgaaggctaaagatgaggcttttctgcccatatcctggaaaaacccttcccttctgagctaagagttggtgggcttctccctgacaatctggtttctggtggggttggtgccaccctggtccccacagtagtgactcttttctctgcaccttccccacaggaaaagggtcccgccagctcctggatgccaaagtcaagctgattgccaacactttgtgcaactcccgccaactctatgaccacatgattgatgacagtatgatctgtgcaggaaatcttcagaaacctgggcaagacacctgccaggtcagagactccaagtggtgcttgtggtaggagaggctagcaggatgtttcactaggcagaggacccttagagccytgggctgggagctaggttcagaggtccacctgtggtaaagctaagacacaggtgagctgtgtctgccccctggcccyctggtgcatctgcatccgcatcaacccaggatgactcagcataatgaccacagaggtcacattgcctgcactgtctaatttaactctcacaacacactggtgaaggtgatgtcatgatcaccattttacagatgcttagagaagttatcttggcctatagcaattgggtggccagtggcagggctgggatttgaacaatacagtctgcaggacaccaaaggggcttgtggcctcagtgtagggcagcctttctgagaatcccagtaaacagggaactgtccagaagaccagtggctagaaggagaaagaagaaggcctagagctagagatttcacagtaatattaactcatgattaggactcatgtgtgcgtgtgtgtgtgtgtggggkgggggggggtgttttagccctagaaaactaagtatatctgtagcctagggcctttcagaactccaagttgctgaggcttgtgactcagagacactgttgcagagagagaaggtggtggctccatcaaccaatgctaaagtgacttcaggccctgccccaagtcaaagcccattccccatagtccctttatctgtagggatcacatcacacagggtcctttctagaatcccaggaacacctccatttagaattttctgactgttgtccccataagccttctaaatgtcctggaaaacagcatgccaacattcaaatcccaactccttcagggagcctccccgtacaaaggaacccacaatgatttgctggccttgaactcactttgggatgggacatcaaggttcctctctccagggtttgtggctctcctgtgactatctgtctcttcccagtgagccaaggatgttcacctactcagaggaggggcagatgggtgcaatttgccctaaactccttcccagaagatggttaagaaaacagctcattcaggctgggcatgcrtggtggctcaagcctgtaatcccagcactttgggaggctgaggcgggcagatcacctgaggtcaggagttcaagatcagcctagccaacatggtgaaaccctgtctctactaaaagaaaaatacaaaaattaggtggacatggtggcacatgcctgtagtcccagctactggggctgaggcaggagaatcgcttggacstgggaaacggaggttgcagtgagccaagagggtgccactgcactccagcctgggcaacaaagcgagaccctgtctcaaaaaaacaaaaacaaacaaacaaaaaaaamcctcattcaattccctagataattgaaggctttcacttgcaggctttggaaacaaatagttgtgaattgaaacctgtttctgtctcttactgtatggcttttatcagtgatgaaagcaattcttcaatctcagatgcctaaactataaaatggaaatctatctataagatcacaaggtcgtggctaagtttaaaatagagaattcattttttaaraacctgtcagttgtagtgtttaagcagtattaagtttytgagagctatcaccctcaatgtcttcttctcctcaccatcatcatcctcgccaccttccgtgagggtttaatatgaaccaggcactgttctatatactttacaaacaatcttcacaagaaccctgggggatggggatctattgctatctatggtttacagtgtgagaaactgaggcctaaggtcacatgcctggcaggtggtagggcctggcttaaaacccaggagatctaaccccatagaccatgctgagcacctaggccacrctgccttggagtccccaacctcctmccctatgtgtgctgagggcccccgagaactcacagtcataacatctgcatcactgagagttgggaagtgcagctgtgcggctcctctgttaagcccgcgtggactcagggacggaggacactgttatcttctctcccttagagtcttgtatcatgtgagatgtggggagagccttgtcactgctttccagagaagcccacggaggctggcaagggactccaccccmtccctccctgacamcccctggagagaggtgggggcatctccagatgtctctggttcacgaggatgagcttatgcctctgtttcccttagggtgactctggaggccccctgacctgtgagaaggacggcacctactacgtctatgggatagtgagctggggcctggagtgtgrgaagaggccaggggtctacacccaagttaccaaattcctgaattggatcaaagccaccatcaaaagtgaaagtggcttctaaggtactgtcttctggacctcagagcccactctccttggcaccctgacaccgggaggcctcatggccaacaatggacacctccagagcctccaggggaccacacagtagactatccctactctaagcagagacaactgccacccagcctgggccttcccagaccagcatttgcacaatatcaccaggcttcttctgcctcccttggtaacccaaggaatgatggaatcaacacaacatagtatgtttgctttccttacccaattgtaccttctagaaaatcagtgttcacagagactgcctccaccacaggcatcctgcaaatgcagactccagaatccccagcatcagcgggaaccaccatcacatctttattcctcagcccagacactcgaggcactcaacagaatcagccatccacgtctaggtatcagagaggaccacaaatacaacattctccatctgctttcagagttattattttaataaaggaagatctgggatgggctggtgggccattccagcttgccgaaatcaaagccatctgaagcctgtctctggtgaacaaacttcctctctggcctctcaggaatcagggtggacatggctcacaacagcagggccttcttctttttgacgtgcagaatctcagtggcatctgggttcacctccccactctgatgatctccagcctccactgcttctgccccccgctgctgaaatcaaacataccccaagttaaaatgaagctcccccacccccactcccggccccggttcccacaggacacgctaagaagcacagggagcatttaacaggctcaccctccctttccttttcccctcttctaccctccccaagaaaaagggccktcaaggcaggaatgagaaagcaaagccaatctctcatttagacctggcttctttcttctgaacaaagtagggttcaaaatgcagactgtcatatccagcgagtccctgaccctttctgcgaatgtaacgagcaagcagtcagcacagcctgggctgccctggcccgggattgatgtagccccggtaggtttgcctctgcagaactaatggctgtgacttcagagaaagccctgcaggaagtttaamctrcgtgtcatctgcctggtcatctcagacccatgaaattaggcgccttgtttgagctgcgtttcacacttctttagagctagctgacctttggccaaaaataaactttgaaaagaaacaatgagtttgtctttccccatggccttgcaagccagggtggctttgcagcttgctactcacgtaagctccctggagacccaggccccttgcgttggccagttcygcagcccgccgagccatttccactttgtaggagccaggaggggtccagccaacacctctggtcaggttcaagtctgatttatacttgaccttgagggtaagagggaagcaagaggaatatgtcagcagggtttggagcggtttgaccattaagtaaagaagattaaaaaggcagccacagtatgagactatgttgtctgtcatcagtaaagccagaacaaggggaacaaatttatcataagcagcatctccctggcacaggggccgcaatgtgctgtgagtccagccggcatgttgctgtctcttgcatcttcccattcaagtgacaaaagttacagttgggagtgggtggggtagtgacacctgctccacacactctgtggccttagggaagccacttcccttctctgggcttcagtttcttcccagagaaagtgcaaaggctgggttaatagctaagatcccttggaaacagtttagcatagccatcgagagcttgggccctcacagcaaaccaaaaggggttggtatcccaggtctgccacttatttgttatgggatcttgagtaagtcactgaacctctctgagcctcaagttcctcatctgtaaaatgaagcagccctggggttggcataagtgccaatggcaggaggcttggaaagcatttgacacagagcctggcccacaggagacactcgagaagtggtggttattattgttattctttctggcactaaagtgttaggtgtcttggattctctctcagcccagctcccccagaagctaacaatggaacgtggcattatggccatctcttaggaagaggcaccaggggaagggcctcaagggagtgggtggaggtggctcacatcactctgcagctggtgggccttctgagcatgcctgaggcccagctgctccgggtcgcaggtgggctggggcaggggctgcctgtagtgcacatcactggccagctgctggctcctcttggcctgaaggaggccgggctggtctgtgctgctgtgaaactgggaccgactcttggcaaagtccttcttgtactcattgtcactctggagcctgccaacgttgaggaaatgcttcatccttgggtcatcgtcgacactgcrgtacccgatctgcaggcctcggtcccgcaggaaagcctctttgtaccggaactgcaagtcagaggagcagaggcagatcatgggtgcctacctcccccaggaccagcctcacatatggggccatcccagggcattctcagcaggaggctcaagagtgggttagaggcacaggctttggattcaaatagacctatctgtgtggccatgggcctgttactgagtttctccatgagcctcagtttccccatctgataaaattggagaatgatctacaccccataggaggttgcgaggattcaaccagataaggactgagcttcatgtctggcatcagctctggcccactgagtggtggctactggtattgtcactattgtaattaatactccaacaggaagataaatgtgcccattctcacataggccactctgcctttgattctttccagcttttagggacctagtccagtgctcctcaaaccatctacagtgaagggccagtcccattttgatttgctttttacatttccaatgcatcaaagacccatgtatggtcctattgcatgtggctagtatgtagcagtaccacttgtatttggtaacacccaacctggccttcacccttttcaatgagatgagtccagtgatcacatgcttggatgttacaacgtctaattgctaaaaaatatttcaaaaatcccatgctcttaatttctgtacttatccaattgtggaccagcaggaaactgttcccaggtgcgcctccgtctagcactgtggacacttgtctagtcaatggtgccctctcttgcagaatacctgctatgttcctgacaccatatacgattttgttttcattcctacattaatctgggagataagatccctatttcatagatgtagaaaatcaagttcagagaatttgagcaacttgcccaagacaaacagccaaatttcctaagtgactgagccaggatttgaacttgtccatctagggcaaaagccctatctctttctactctaccacactgaacttcagctaaaagaagtccttttattgcaaatcaacaacccaagctcatattcatgaacctcttggtactcatccatcatcttttaagagtgcctctctaaaaagagaatggaaatacagccctccttgaccacaatttctgcctaagatgctagaaagtaaagcccttttttttttctttcatttaaaatacagtacatgttcagttttggtgcagagagagagataatcttgacaggtcctggtggtttgcctttcaacagaactgggaaaaccagagaaaaactcatcagtgaccgcaggagagaacatgggggtcttacatcactggcgatctccctagatgcccgggcagtctggaaggggatggcatccrgcctgaagtcataactgccagcccgggtctgctcccaggagtttctgtagactttctagattggaaaaacaaaagcatgagtaagcaggcagtcactccactgtcttccatgttgctggtactcagcaggagtggttcttaacctttgttggttcctaggacggcacagcctatagctccatgtccaccttggcgactccctagcactgggattggtggggttggccgtaaaaggcttcagctctaagcccccaacccrcccacccattaggccctgctcctgtggggcttgtgatcttcgggtatggctcatttgcgacacccacttggtatcagaagcctccaccccactccttcctgtctttgcattcactttcagtgcttcgggtttgcagcttctaggtgccagaattcaagcttccagaatccagtttcttcctacatgctgaaagtgctgttccttgggccttggcactcatgtgtttgttagctccactgacatccggaggggcctcagcctggctttgatgccatgccttgcaccatcactatgaggcatgctgcatctcatatacacccctggtgcctgcacgaagggaagagccttcacctgaattaaatttattgkcaagcacctgaccgagtacctgacccatgtgtttcatatcttcctctttcattttttcccttttcaagttgktctcacacgccctctgggagtctgtaatcatatcctcttagtcctcaggtagacccacatcaccgatagaggcatcaaaatcttctgtgccttcatgtagctaatatttttttttcaagataagggaatggctctataaaaggaggcatctggagatcccagtggagggctgttctttattcagccacagagaagggagacagcaggagaggcgcatcaccaacagatgacaaagtgacagccccagaccgtgtcggttgctcactcrttccacgagctacagcaggtcagggggcccttaagaaccgtccttttgtctcctggaaatggaggtcaaggctggcactctgttctacgggggattggggggattaagcaaaggaggagtggcagatgaaaagcaaagtgccccaccccatcccacaactgggcctggaactagagaggaccacaaagtgcttgggccaagcatggcggatctcatcatttctctgtactgcagatcacaccaccttcacctccatcctcgcctctgactccaacacccgatgccgtaaaccctgagccaaacgtctactgtgttctaggccctggaaatgcagaaccgttcgttcctgggataatcacctaactgatgaatcacagagccaaaatgattagatttactgggtcatcattgagtttagcagttaggactgaaagacatgtaggaatgttcagattatgacagactgatgatcctctgtagcattctgctttctgtttgggtggccccacaaaggttagagtagcaaatagagtcaaaaccctgatcactctctctaaggggcacaccatgccttcctaataagaatgcccgcaccagatctgggctggttattgacaccaaacttgatgcaacatcgaagtccaatgtcaccccactttggtgtccaatgcaccccagcttctgagtctctgtaactcagggtcaactagaaagcatggcccagatcgggggtctcccgagtgtgcaggcccctttctctgggcgacttctccctgtgtactatttgcttggttgtgatcacttcctccctgagttttttattctgttgaggtttttgccttgccactgggagtctttagattccgtaggcgctttgatttggaaccctgggcgttcctcttctttatcacagtgggcacagttttgtcctcrtcctcacacattagagtcatttgatttttagttatttcggctgccttacacatctcaatggctttctttgcccaggaaggtcactttccctccacatcttcctcacagagcacttgatccaattgtgcgtattctacacgcccccgaagaagtgctctttcaaaagaggttcatgagttatccatatccgcataccctggtggctaatttcagctccaggactctgcagaccggcatcccttgtgagagggaagatgcttccatcaccagcctggggtggctctcctcctcaagccgggccccaaatgcactggcagctttatcccactttctacagcgatgggtctccaatcgttcctcaaatggaggccttgccttcccccatccttgaagcattaatgagatagatgttttgtgcaggctctgctgagggggaggtcctgcttccccagatggaggtcagcccaccagagctgctgttctaaaattatcccctgcacatmcctcaaaagcatcaaatggtcataataactcatatttacaaagcaccatcgcattcactgcatgggatcccacagggctttacaaacgcaacaaactaatacacacgctaactagaaggcgcctctcgccaatccctgcaaggcagccacctctggggtgaayggtagcagctgttgatctgcacggagccccaggacacaatggccaggccagggagggaagaatggccggactctgggaggccctacgctgccccaggccaacacactcagcctgtgttattctgatctgacagtgtcttttgattctgccgtctctctacctgttatccaaggatcacagctttgctggccgagcggccgcctattctattacaaccaggggcctccaacccctgctaacaacaagcctgggtttaggaaacagtagcttggttatgcacgcaaagggcacatgtccaagggaaacgaaagtgttggaggccacagtcccatgcacaaaggagcgagctgcatttggacgggatgggctaccattgcagcatctttccaaactgtggggtgagatagagccactctatctccagtgacactactctgaatgactacagagaggggtccaggaaacaaaaagagcaggtgtctacacccactagggccaggggaccactcccctcatggttacccagcacatcactgagatctttggagccatacccaagtcagaattttagagctggaaagaatctcagtttagctcagcccattaccattttgcagataaaaaaaacaaaaacgaggaccactgaggaaagtgactgaaagtcacacaaacagtttctcagttcagtgtcctttctgttccaagtcctccttcctagaacttttttttttaaaaaaacgaaatccacattgggcacagatcattttacaaaagtgggcacacgttccatgaaccacca

SEQ ID NO: 6895 - DNA, 31644 bp, Homo sapiens
aaaacaatgtttccagtaaactagtaggagattataaggatccattctaggaagtcactgaatctgcttaaggtatggggttaaccatgagttcaccaaatagtctttcaggggtgatcttaggtatggaactggtaaactttgagattcttaactccatgtgtaatgccattctaaaacacaaatgtcatccgtctactaaaaaaacaaatcaaaaacaaacttcaatctctgtatcctcacagaaggaaaagtctaaactattaagaacgctatacaatgcatttcacaatgtgctcctaacctaacctacctttgtctccttttacttttaccatgaactcttacaatcttgccacactaaattatttacctgttcttggagcaagaatcctactcctctgtgattccatgcttgtttacctgaagcttcctcagccaggagtgtcccttctgccccactttcattttcagctgcactcctgcttatttttcaagttctagctcaattgtctccttctctgagaaatcttttccaatgtttctaggcaaagtgacttattcctttccttaggttccataatgttttttattcaattttgttacatatttcctcagcagttagcagagtaccctgcacataacaacatgttcaataaacgtgatgtcttgaacaagaaacactggcatctaaaacctaggagataagatatccatatttcttaaatccatacagataaatttttaataacaggatttagctagtagaaatatttgagttcttgataaatcatttgactggtaattttaacatacaatgtattacaattcaaaagcatctgaagtttcagttgcactgaagatttctctatcacttcccctttaaagttaagtttcagaatatcctttactttcacacgtatatagtctattctcatctttactaacacaggatcggtgaccctatctcttttttttatccactccaagattagtgcttcaattcacttgaacctaattaaatgatacttttaattaatttcatttactcccatgttctttttttagaaagtagacaaaaaaaatttgattaatttttcaaacttctaaagccaataagtataatctcctacatctttagaatttgtaataccataaaaatggatttcctagtgtgctttgaaaaacattagctgtaataaatcattttttaatgaagcagggtcaaagaaagagtatctgttatattttgcattccactgcagttcatgtcattcaatattaatgaaagcctagtcacatttcctaataagaactttaaacctttgtatcacagtgaaaacagtgtaaaattaaggtcagatattttatttttttaatagaacaaatttaagtcagcctcaacatacaaaaagaccttttaaaatatctgatcatgaaaaatagcaaattatgcccctatccgcagagaaaaaccatatactaaatgctggttctttagataggcaaaccactatcactaagcttaatcctttatgaaaaggtacatgaagtctttaattcatagataagagattacttttagaatccctgaagccttgccaaatgttcattctcctatgagctaatgagtcagccactcttccagtgactatgccaggacagtctgttagaaactaattaaagagcagatacctttatcagagtatgtgtgttctaatgcatggagatcaggcaataggtgaatacagtttatgcagcagtaggtgaagaaatcaaggacgactatttttccacatagatccttgtagacagaaataggttcttctgtgttcagccattctaatcctgaaatttacataaaataaattacaatgattaaagagaaagataaaatttacctaaaactttccattaaaatgtgacctttttttttaagactaatgcaaataaacactttgagagagtagcaccatataaaggctgtggcagttgcatgtatttatagttgtttactatgaaccatcattttctatcaacaaaagaaataaaagatatatctttatgactgtaactaaacaggtatttgggtttggaagaacataccaaaaaggcaaattagcagagattaaaagcccaaaaagggaagaaagaaaaggaagggatgggggtacgggtgggggagcaggaggagtagaggatgggaaagctgctattatgatgccatctgcaaataaagcaagaaaaagctactaaattctttcagaaatagggtaacagtctgtgaaaaggagtaaaggcaacacacttaggcaaaaaaaaaaaaaaaggaagaaatatcaaatagtaaatgaacctaattacataaacaattagatacaaatgggctactgagaataaaggtcaagcttaagaatagtaagatataactaaacatcaaaaaggagtgaaatgtgtgtaaggataaacatacaaaatgcctaaaacagtttcctaaaggagaagaaactgaaatattctggatttggatgagaccgtaaatacaaaataaaatatgctaaatgtaaagttaagcaaaatacacttattattgtcacagatttcattgaggtaacattaatattaatgaagaacgtgttccctttcctccaaaaaaagaaagctctgtactatgaagaaagattttgttaactaataataaagtacagcatccctatttaaccaatttaagaaaacaaagtttactgcttataaataactcaatgcagctattacaactattaattatgccttgaagcaggtatttagaatagcttttagcaactgaaagccaaacttgggaggaagaagtaaacagtaacagctaatgattaacaacaataactgttgttactcaatcataacaaaattctagaaaaaaaaatctgcagatcaaactagtatttgggccaattagtccaaactaatgaggtttcagggtacagtgacctcttaattatccattttgttaaaatattaattatataccagatcaagtgatcatacaaaacttcagactaattaatgtatatttcatatcctacttgcaaaatatttattaatctgtcttctgtgacttttctgtaaatagtcaagagtggcttagatcagggggtatagaaagaatgactacatcttagtcaccgtgctagatacttaccaggcttaataaaatttattttacaataacaataattacaatgaatacaataaaaagctgctaacatttagtaagcttttctgtgaattaagaattttacatatattactttcaatacaaataataatcctgaaaggtaaataatagttcagttttgcaagtgagaaatataaggctttgaggtcaagtaacttgctcaaaatcacacaaccaacaaaatggaaataacaaggatctaattccaggtctctgtgaatctatccattacactgcactgtctcctataaacatgtaagtcttctaagaaatgaacaaagcatacagtttttcaaataaagttatgtttatgacttcctgattatagtttactgctaaagaaaccaagaaaacagtcatttctagcattctgtcctcaataatcgggtccaggagaaaatcatactgtgttaaacacaaagcctgaatattttattatatgtttttttagttatgagtcacagaggtcaaatctcatgggaataaaatacactccctgtaaatacaaacaagactagaaaataaaaaacattccccaaatcccagttgatggcctgcttgtttataacagtgtacttactatataactaccttctgcaccaaaactttttaaaatcatatatttgtatagatgtaaacaatcttttaaagtttatttgatgggataagcattcatgtacccaattcttttgtaagaattccacaatatttcaaatccagtataagattaatagcaggaaaaataagcacttctcaaggtgagtagtgcaaaagacttggaaagacaccaatactctgttgtcggaggcaggttccgatatacctcccatgagataactgaattctgccacatccaaccaattaactatacatgtggtttcagtgtcacgccaggacacatgccagcaccatcaggcaaagcaatgctactcccatccaaagaaggtaaaatacgttttcatttatcatggcaagatatgcttcacaaacatccctgccgggaatatctgttccttcatgctccaaaagctcacatggccaggatttaaaccctggaaataggctataattgattccgatttttaaaagtattagtttcacgactttgaacggagaagcacagtacagctaagaaaccagcaaatccagggcctgtataatccaactggggcagttatcagctgtgaggccctgggcatgtgacttaacctctctgtgcttccatttcctcaactgtgaaaggggaatgataggagcacctcactgggatatagaggtaattgaataaggtaatatctcctcaagtgtttaggtatcccctcaagtgtttaggactgtgtgtggcaggccgggcgcggtggctcacgcctgtaatcccagcactttgggaaacggaggcgggaggatcacttgaaatcaggaggtcgagaccagcctggccaacatagtgaaacgccgtctctactaaaaatacaaacaaaacaaaacaaaacaaaacaaaacaaaacaactagccaggcgtggtggcgcgggcctgtagtcccagctactccggaggctgaggcaggtgaatcgcctgaacctgggaggcggaggttgcagtgagccaagatcacgccactgtactccagcctgggagacagagcgagactccgtatcaaaaaaaaacaaaaaaaaaccctgtgtgtgatacatgaaaaagtgatcaataaatgtcaagatgatgcagaaagatgaccagaagacactggggaaccagattgaatggacagaatggtgtggacgttgcaatcattgccaccggggacactaaatattcacggagtgtccacttggctaatatcaggcgcgggcggaactcaggatacacagacgagtatgtggatccccgtgccagggaaacccccgtcggtggccgcttggggacccctgggaattgcagaacacgcgaacagcggcccaagttaggcgaagggccactccccggggcgccagcggcacaaacccgcctagcccaccgcttcgcgggagggcgccgtccccgaggaaggggaggtgccgggaggggcccccaccccgacgccagcccctcaccttccggaaactcgggtactgacaagtcctgctcccagccgtccaccttctgcagatactggtagaccaggctgtccttctcctgctgggtaacggcgtcgagcagggcgtactctagcgaggtctgcgcggggagcaggccggagaggctgcggccccggcctccgggcgccgccatgtttccgccgggctcccgatgcggccgccgggcccgcgggagagtctcgctgggagagacgaaacgttcactgtcctgtggtttccaaacggcgcattcacctcaccctccactagccccactccacgccaatgacacttttttctttttaaagcataggtccaagtgccaaaagtccaaatcggcgcagttcccggggacgtaattaaactgccgtccgacccaccccgccccttttcggtccccacgccgcagccgagcctggacattgagagcgtcagattcaacatggaataaggccttagggacagcgtcccagaggcgctaagggaaacatccccaaccctccacattgggaattagcggactttcgaacacaaataaaatacaataaatccgtaggacttaaaagggcaatgtatttttaaaaattatttttaaagtctctctctttgaacagcatccgccgattcgacacggcactggcagcgggaacttgttcccgccaagaccctaaaggtaaagcgggtagggataacctccagagagaaggctttgtaaactggaagtgactggcgcgagtggctttcacttatacacaaacacagcgttttgtcatctgggagtgctgaaagtgcgggcgcgaacacatttttagatgggggtgccgggaggagcggatgcagctggagcggctcccttggggtgccgagtggcaggtggggggcggtgagggtccttgagggcgggccttagagtcttcagaagggcaggactctgagggctttttggagctcgctatgcttaacctggagatgattaaggccccgcttcctggcctcccagcctctaatgccaaaagataagggagaggctggcgtgtgaccccgttttgagtcaggtggacagagggctggccaccttcggaaccatgggtgcaatacggagtcagacctcaatacaagcccactctttcacatatttgaacttttttcacatatcaactttttttgttcactgcgcagggattgttcattgctgctggaggaagatcatggactgtcgcgggaaactgaagtggttgagtatccactagtcgtggatgagggcagtgacttcgcagttttttgcgaattacacatctctttgattatgttgtgactagttttgttagatagtcatttagtgtttgggatacctgttaagccctttgtccagggactgtggttggatttatgaattatttggacggttgtccacttgaaagaactgacagtagcttcataacaatgttacaaatctcgttctaagattaagctgttgaacctatatttgccattagcgcttaatttttgaagtattatttttatgaatcaagccctggaaaaggacaagatatttgaatgaaatagcacccataatggagaacttcacagttgctactcctgtgataggtttatcttagtttcattgtggtataaatggaatagcaggtgttgtcaggtacaaggtttgtagcttgccaatatgttcattaccaacactgcagattcccattgagttggtgggggttttgttacctttgttttttttctcagcaaaataattctataactttttgtttgtgacaagaaatggactttcagtttacttaagattaatacttcttgaatgataaaatcattttgccatgttagaagacatttccgaagaagacatttgggaatacaaatctaaaagaaaaccaaaacgagttgatccaaataatggctctaaaaatattctaaaatctgttgaaaaagcaacagatggaaaataccagtcaaaacggagtagaaacagaaaaagagccgcagaagctraagaggtgaaggaccatgaagtgccccttggaaatgcaggttgtcagacttctgttgcttctagtcagaattcaagttgtggagatggtattcagcagacccragacaaggaaactactccaggaaaactctgtagaactcaaaaaagccaacacgtgtccccaaagatacgtccagtttatgatggatactgtccaaattgccagatgcctttttcctcattgatagggcagacacctcgatggcatgtttttgaatgtttggattctccaccacgctctgaaacaggtaagactgcagaaaacgtagtagtttctaaataatctaaaaagtcttcattaggtcagacataccaattcagtgaaacaaggaaggcaagcagtaacctaaaagagagatgagacactgggaaacaccataccagtcaacggtataattgtaaagcaaatggcagactagaaaacagtttaaatacattgtgttatttcataaaagttcctaagtatctggattattttccataaatgttaactgaatccttactatgctgggtactttcacactgtctacttacccaactttcacaatcaccatataaggtagctagtattgacattttatagatgaaagttcttaaaagtcagataacttgtccaattggttatttatttttttgagacggagtctctctctgttgcccagattggagtgcagtggcgctatcttggctcactgcaagctccgcttcctaggttcatgccattctcctgcctcagcttcccgagtagccgggactacaggcgcccgccaccgcacccggctaattttttgtatttttagtagagacggggtttcgccgtgttagccaggatggtctcgatctcctgacctcrtgatctgcccgcctcggcctcccaaagtgctggtattacaggcatgaaccaccgcgcccggccccagttggtggttattatggaactccatagaaaattataaataggctgggcacagtggctcatgccagtaatcccagtactttgggaggtggaggcaggcggatcacttgagcctaggaattcaagaccagcctgtgcaacatggtgaaaccccatctttacaaaaaaaattaccaaaaattagccaggtgtggtgggctacttggaaggctgaggtgggaggatcacctgagcccaagaggtcgaggctgtagggccctgtgatcatgccagggcactccagcctgggtggggcgacagagggagaccttgtctgaaaaaaaaaaaaaaaagtatagatataatgtggtttctaaatatggttatgttttagtcatcgtgctatgtatacaggaagaggaactgtgaaggagtcctaggtgattaagattctaacaaaaaacgtgtcaaatgataataaaagtatgctatgttttttatcttttaaaatatgtaataagtatttaatgtagaaaatcctacttggaatacatatggagaacaggttgttgtgatgatttatatattttgaaatcatttatattccatatatggatttttttaatctgaaaaagttaaaattcagtaaaataaaaaaatactyaatatggctttcatgttagctatgattcagaatacattttattattaacctgtagttattttaaagtactgcatgaagatacagaaaaaaaacaactcttctttaaatttggcattagcctttcccagaaaaggatagcaagtgaaaacctcacaaatttgctagtaattttctttcatgtaacttgaaaatcaagaatggaaattggagtccatggttgaagaccttagggtaaaatgtcatatagatgaagccacctcaaaaaatttttcttttggtttttcactaaactcctttgagtagactctcagatggctcttgaattaaattccattctataacaaatgcttttaagaggcatttttaagttaggttgtaagccatgaagttttctaatttaatataacaaatataacatcttttttgaggggagggaggtgtcattttttgataaatctggaaattaacatacacagggatataccaagatggcttatagaaagtttctcaatcatggtagtatgatagggaatagtttccaaattagtaaagccttataatkaaccaatttctcaaattctattcttagaatagaatctaaaacttgttcagtgtatcaacaattataactaatcttattaaaattgttgctttttattatatgcaatgtggatattaaataatggaacccaatttatactgctaatgttgtcaaagcttagtctatgctttgatcgtgtaatattttttctttattaaaatttcagagtgtcctgatggtcttctgtgtacctcaaccattccttttcattacaagagatacactcacttcctgctagctcaaagcagggctggtgatcatccttttagcagcccatcacctgcgtcaggtggcagtttcagtgagactaagtcaggcgtcctttgtagccttgaggaaagatggtcttcgtatcagaaccaaactgataactcggtttcaaatgatcccttattgatgacacagtattttaaaaagtctccgtctctgactgaagccagtgaaaagatttctactcatatccaaacatcccaacaagctctacaatttacagattttgttgagaatgacaaactagtgggagttgctttgcgtcttgcaaacaactcagaacacataaatttgccattgccagaaaatgacttcagtgactgtgaaatctcctattctccacttcaaagtgatgaagacactcatgatatcgatgaaaaaccgsatgattcacaagaacaactgttttttaccgaaagctcaaaagatggcagcctcgaagaagatgatgacagctgtggtttttttaaaaaacgacatggtcccttactgaaggaccaggatgagagctgccccaaagtgaacagcttcttaactcrggataagtatgatgaaggattgtatagattcaatagtctaaatgatttgtctcaacctatttctcaaaataatgagagtactttgccttatgatctggcatgtactggtggtgattttgtgttgtttccacctgcattggcagggaagcttgctgcttctgttcatcaggcaactaaagcaaaacctgatgagccagaatttcactcagctcaatcaaataaacagaaacaggtaattgaagaatcatctgtttacaatcaagtttctcttccgttagttaagagtttaatgttgaaaccttttgaaagtcaggtagaagrgtatctttcttcccaaccaacccaaaatacaattagaaaattatcaagtgagaacttgaatgctaagaataatactaactcagcatgtttctgcagaaaggcattagagggtgtgccagttggtaaagctacaattttaaatacagaaaacttgtctagtacacctgctccgaagtatttgaaaatattgccttctggtcttaagtataatgcaagacatccttctaccaaggtaatgaagcaaatggatataggtgtgtattttggactacctcccaaaagaaaggaagagaaattgctaggggaaagtgcattagaagggataaacttaaatccagttccaagtcctaatcaaaagaggtcctcgcagtgcaagaggaaagcagaaaaatctttaagtgatttagaatttgatgcaagtactttacatgagagtcagctttctgtggaactttctagtgagaggtcacagcgtcaaaaaaagagatgtagaaagtcaaattcactgcaggaaggagcgtgtcagaagagatcagatcaccttattaatacagaatctgaagcagtcaatttaagtaaagtcaaagtcttcacaaaatcagctcatggtgggctgcaaaggggcaacaagaaaatcccagagtcatctaatgtaggaggatcaagaaaaaagacatgtccattctataagaaaatacctggtaagktgaaatgtcaatactcgatatatcaacaaagacaacgtttttgaactttgtgtttattgcccattgtgtgtgtgtgtgtgtatgagacaattttttgtatgtgtttcctttgcttttgtgatacttcatgagcctctaacgtagatatggtttttgcctatttgattttttttgctccattcaattcatcaagtttctattaaacatgccctctatgtaagtgactatactagttaggtggatattacgggctatagaaagattagtaagagaggaatagggattcagcttaatatgaaaggaggaaaggcatctctgtaaataactataataaaaggcagcctctaagtgcttgtgagaaatacaaagtactaaatagtttcaaagatgggaaatgtcacaggttttacatatcatagtaaatgccaaaaattttaaaaccgtattagaacttagtttctctgccctttcatatactttggttgctgccaaaatatacttggttgctgaaagatttttaaagtgctttattgatgttctagatctataatttgttcaatgtatttatgtaaagaatagcatttatatacttcataacatcagtggtgtttttaataattattttgattaattttctgtacttcatttatttatttaaagacagagtctcgctctgtcgcctaggctggagtgcagtggcgcgatctcagctcactgcaagctccacctcccgagttcatgccattctcctgcctcagcctcccaagtagctgggactacaggcacccgccacaacgcccggctaatttttttttcatatttttagtagagacggggtttcaccgtgctagccaggatggtctcgatctcctgacttcgtgatccgcccgcctcggcctcccaaagtgctgggattacgggcgtgagccaccgagcccggccaattttctatactttaaatgatcctaaaaccatgtgttgataagcctcaatagaattgggaagttatgcttatttatttgcacatcgccagtcagtacacttaattatttcttgcatgagcacattttagaacagtatttctcaacctcttcttcattactgctcctctaaggagcctttttaggcatttttttttcttgtttcccaccccctcctctagttcgactgtgcagcaaaattcaaagatggtagatacgttgtttgtctcatatgtgagattatgttggccctcaaccattttggcttccttagatcaatactgcccccattgagaattcatgttttagaagaaagttagcattctccttttgctgttttgcagaagtaaagtgctaagtattatgaaagtattagttaaaacaaagaagtaattggtttgtaacctagaatttaaaattttggtgcaattattcacaaataaaagtctctatactgagatacttggtagaaacttttaagacattctcatctttagtgttaccttttgttaaatttatgtgatataagtttttaaatatagttaaattggaaataagaggtaaagaggatagagggttcattcagtatttataatcaaattgggtatcttagctcttgctcaacctactgtgtcggtatttttattgcaggaaccggctttacagttgatgcctttcagtatggcgtggttgaaggttgcacagcctattttctcacacattttcattctgatcattatgctggattgtctaaacacttcacatttccagtttattgtagtgaggtaagttttagtattctaacttttgactttgtagaatgctgtgaatttctaagcaatttggttaaaaaataatrattaaaccagtaagatctttcattctactagaaaaaaawtgagaaaacatattccacataaaagtcctaaacttaaaacgagttgatgtcaagtttcagtttttagaaaacatctgtcttattacatggaaacaaaagataaactatttcacgatgtactaaaaacaagaaatttcatttagttaacattcactgaaagcctaaatggattctcaaggcaaaatacagtcagcctgctgtatctgtgagtgccctatccatggattcaaccaaccgcaaccgaaaagattcaaaaataaaaaataatacaatgaaaaataatgcaaattaaaaaatatagtataacaactatttacatagaatttacattgtattaggtgttataattaatctaaagatgatttaaagaggatatgcataggttatatgcaaatactatgccattttgtataaaggacttgagcatcctgagattttggtgtcctcagggggtcctggaaccagtcccctgcagatactgagggacatgactgtatcgagcttcaaggagcttataacctccagaggaaacattcataaataatgccatattgggattggtatcataatagaagtagtactccctaggagtagggagaagagagtgctttatcctgtcctgggctaaggttagacacagttttgtggtaaaagatacctcgaactaattattaaaaagtgaacattttaatgctcattactaagggcttgaactagaatttgatttaatcttcacagcattcttgaagcatgcttcaggaattctttttattaatgaaacacctggggtttggagaagttaagtgacgtgccccaggtcacagagctaaaaatggcagagtctgaacttgtatgcaaatctgtctgattccaggaccaggcagaggaaagagcattctaggtagagagtaaagtttatgtaaaggcacaggcacctgagaaatatgcccattccaggcacttgagataattcaaaatggctagaacacaaggtagggaataacaggagacaaacccacaggaatgggctggaaccagatcactcaggcttttgtatgtcatggtgggaaggatggactcttcacagatgaggcgaagtcagtgacgattttcaagcagagtagtggcacagccattataggaaattcttcctggcattgtggagtgtttacttaaatataagtaggaaaatggatgttattaagatgctatggttctaaactagrtatgaaataaaatatttagtgttttactgcatcagcaataagcaygtcctgttttgcagataactggcaatttgttgaagaacaagcttcrtgtgcaagaacaatatattcacccattgccactggacactgaatgtattgtgaatggtgtcaaagttgttttgcttgatgccaatcagtaagtattaaagtcatcttaatagcacattttttaaatgttcaaaaggacaacacattggcatgattaataacttttttcattataattaatatgcttgatatttcttaaaacttgagtaagatgtttctccttttgaaaaataatgtgcccaattatagaatcagagatgaaaagtaaagggatcttctaaatgttatctaacccattttttatccagtttaaattactacacttgacatctgagattccatcttattttttaaaatactttaacatgttgttgctgttctttgcaagataacattttgccattttctttagtatcatttatcatttacataaattaacagcttgtattccattcagatactagaggtcggttttatctccccctacccctctttaaactaagaaatcattcaggctttagatattaaaggtttggaagacttttttttcttggaaatggcctccatttttccctctttttttcttttaatataaagtactatcagcattcatgttgtcaaaacacaactgtcaactctgcttctttctactttccatagaatgttagcccactgtaacatagaggtcatagatgaagagaaagaagactaaatctaggttacctaaaatccaggccaagctattacattaggttgcctttaagtttttgtctgctaactttgctactgttttttttttttaattgccagtttgaattctgattttttttttttttgagacagagtttcgctttttttgcccaggttggagtgcaatggcacagcctcagctcactgcagcctctgcctcccgggttcaagtgattctcctgcctcagccttccaagtagctgggattacaggcgcacaccaccacacctggctaatttttgtatttttagcagagacgggattttgctatgttggccaggctggtttcgaactcctgacctcaggtgatacacccgcttcggcctcccaaagtgctgggattacaggcgtgagccaccatgcctggccgagttctgatttttaaagtcaactttatggggttttcaccatagatcacaaagttagcgtcaagctagtatcacatagttcaatgtctcaggcatacaaaacagtcttaccaggcataatattcctagggttcagagttcatttcctaggagccagccaagggccagtcctgaagacatgcttttcttgggaatgtttggagtttgagcaacctgggtctgcctttcctgcacaccagttctttttatgatgtaaatttccttgagttgaagtgccgcatttcctgtagtgcaatgctatgtcattgtggtcagctaataaagygtgctaacttgttgatattgaaatagatactgttcctttaggtgcttgcctgtgttatgaacattcctttgacatttgtgttcagctgtccaggtgctgtcatgatcctcttttatcttcctaatggtactgtcatattacacacgggagacttcagagcagatcccagcatggaacgttctcttcttgcggaccagaaagtccatatgctgtacttagataccacgtaagagaggctttttttgtgtgtttccttttcccactgacagcctttgctctctgtattatggttatcaaaatgatggcttattgccaattattattttaaggctctttatcagagggatgctgtttgaaaaatatgtatatacttgcttaagggcaaatttgagattgtatgtgttaactgactacagctcatttttttgtgtgatttatttttgaaaatatgttacatgagaatcctgttactaaaacaaggaagaaaaacttaggagcaaactttaggaagacacccttttaagttgtcctttcagagtaactgtgtagctattaattgtgaagagaagacagaggtcaaaatgtgattctgtttttgagtatccaaacttgctgttgttcttttcttaaaaagataatttataagtgacagttttgaattcctgagtgctataaatataatggcacaagccattacattttaactgtgtatgtatttctccctagctttattaagtaaataaaaattgtatatatttctggtgtatgatgtgattttatatattaaaatatctcatcaacttgttagaaattatcttaaccatttcaacctgtttcaaggagaagtacgtttggatgcaatattttagtaaaagatggtctttccgcatccagttttctcacactataactggtttttccattcttctatatgagttttaagcactggataaattaagaaaataagtttttaaaaaaacccttttttgttacctagttctattctgatacgattctgaatttcctcatgggttgttataggagaaaggttattcttactcttctctagtagttgactagcaaaacaattctgaaaattgggaaaaatatgtttctttggcttttgcagtttattacatttttagtgaaaaagtgcttacttttcatatcaaatatagatagatagatagtagcttaatttttcactgggttatattgcatggagatagacccaactggatctgttgtatttgcatgtatctgtgtgtgtgtgtgtgtgtgtgtgtgtgtgtgtgtgtgtgtacacatgtacatatatatacacatagtatatatattttgtatctgtaagaaatgatattaatatcaaccatgtcaatattaactgatttaaaactgtttcactaaattcatatttagtttcattactttaatcattttttattgacagtctttagtccaaatataatccttatcaatatgattttttgatagtgtttggagttaaataaaagacagtgaggtttataatttataactaaaatagctggcttgctagaaatattcttggaggaaaaaagtcttcaaaaagacaattttttgagagtgataaaagaaatataatgaaaaagatatattgaaaacttacaatttgatcttaagttagtagtaactggtaaataattccaaccacaggcagtgagataacttgtggtattaatatattacattgctgttgtatgtaagttgctaacgcttgttttctaaaatagcatccagcttaaggtgatggcttttttattgttcttttagtaagtaccatgtttccataccacagatattgtagcccagaatacacctttccatctcagcaagaggttatccggtttgccatcaacactgcctttgaggctgtaactctaaacccacatgctcttgttgtctgtggcacttactctattggaaaagagaaagtcttcctaggtgagttgtaggtgtatctaatttacattaatatattataaagatcagattctttttgcataatgccctttcagtttctactcttgcatttgataattatttcctgtaatgattcaatattacctttgaagttgaaggaaaatttgacagtttgaaacatttaatctttgaaaggtttgactttagggaaacatttgataattgtgtttaatttaggctttctagatataagaaatttatagagcagctgcccatgctacattgttrtttagtaaactttgaaagatgattaatgcatagttgtattgctgcattctttgaggataataattacattggcaatcagttttaatttttgttcctaaatgatttctggatgtataacttagtttgtccaggtagtattgtactaatttgcaaaatactttccatttcttcttacgtatggccacattatatcaaacattaaagatgataaagctggggcttttaatttcttcaaatttagttccttcccttcctctacccactttctatacacttttgcagtttttaaatagtaaataataagcctttaaaaataaattatttagttttctcacaattcattccacacagtaaactaacaaaatgattcagcctttttgagatatcatggtaaaagtgtgaatgttttgaatttccttttatttggtaaattcttaccttaaaatttgcttaagctgtaactttttttcacaagctgtaagtttactatttttaatcttttcttttgcccatagccattgctgatgttttaggttcaaaagtgggcatgtcccaggaaaaatataaaactctacagtgcctcaatataccagaaattaattcactcatcactaccgacatgtgcagttcattggttcaccttctcccaatgatgcaaattaattttaaggtaagcattcaagagatatgtcttttaggatgaacaaaaaaggtaatctgattattttaagcttcatttaacttagaggaattcaattataatagagtcacccatagtaaaatttgccctagacaatcttttaagaggaattttaaatgttcatagtttttctagatgtgcaactctgtagagtaattcatatgcccaccagaagtttaggagctagagaactaatatataggaaggaacaaaaatggaaaggtatgcagctatctggtcattcaaaccttcaatttttaagatcattttccagttctttctgggtgagtggggaaatgagtgaagaatctaagaagttcttagtttacttcaggtctattctattctgtattaatattaagcctttctagattgataaatattgaaaatttacttgttgcgacaattaaatgaaatagtggaagtgtatcctaagaggaagtttgagcattagttccaaggtgtaagttaagacgtatgatatgaccttgctgggatttgggggcttatttgtcagacttattcatatactaactaacgtttattccatatactaacattttgacacctggcaattgaatacatcaaacctgtatattaaaataaattcagaacataatgcatgaaacaatgtattttcacatttgctattgtgtttatgaaataaaaagaatgaatgagaggtgaggcaatggagacaggaagactagagcatggtgtgaagaggagctggatactttcatggccaaagggaggagggttgcttgtctgttagccatcagagatgaggatttttatgttttaatggacagggagaatctaagataagagaataattgatgaagtaagatttctgagcaagatctgaaaaataggtaatgaagcgcatccactttgaacaggaagagggccacctcttcctctctgacagttccgtcacaacctaccactctacagactgcgttctgatgcatatggccttcttgtagacagcatatatttacaaatcccaacttaaacaagatttagattttcactactacaaactcaaacttttttttttgttgtttttttttttttggagacagagtctcgccctgttgcccaggctggagtgcagtggtgcaaccttggctcactgcaacctctgcctcccaggttcaaacgattctcatgcctcagcctcctgagtggctggaattacaggcatgtgccaccatgtccggttaatttttgtatttttagtagagatggggtttcaccatgttgaccaggctgatctcaaactcctgagctcaagtggtctgcccgcctcagcctccccaagtgctgatattacaggtgtgagccaccatgcctggcctaagcataactttttaatacaggaattcaagttggtttttaataactcaggaatgttgattttgaatgattttttgaggctagtgtccttggaggagtgacctggagtcattaaatctatatttttgatagtcgtcaagtctgtatgtttccacgtctaggattttataataaaacacaagttctttgtgaaaaggtcagtctgtaaggctcctagctgctaatggtgtaatagatgatgagagatagaaaaagctgagaaagggcaggtggtttccattagaaggtgaggtttactgacctcctgcccactaggctgtaagctcgcagaaagtgaagtctatatcttcttgtcctccacactgacccaagcaactatgtaataccagaatggatatttactggtattgccttcagtagtccctcctcttcctccattaaagtgactgggtattgatcacattttctgaagacttcttttttttcttttaatatttgtttattaaacattctagcaatgataatggaaatatgtatttaaaatgtttttgaatagatgatacattcacaacgttaaaaaacaaaactataaaatggcatattgtgaaaagttttttttcctcccctgtccctcatttacccaaatattttcggaagatttctttttttttttttttttttttttttgagacagggtctcgctctgtccaccaggctggagtgcagtggcatggtcttggctcactgcaacctccacctcccgggttcatgctattctcctgcctcagcgtcccgagtagctgggaatacaggcacctgccaccatgcccagctaattttttctatttttagtagagatggggtttcaccgtgttagccaggatggtctcaatctcctgacctcgtgatctgcccgccttggcctcccaaagtgctgggaatacatgcgtgagccaccacgcccggcctcggaagatttcttacctccaaaacgcagatggagcagaagctgatgtttgtaattagagccaattttttttttttaccagccaaaagttgtgtttcatgagagataattactttctgtgaaaaggtaatcctaatacagttttcaaggtgcccagggcatgcctgaaagcctttgaaaggctataaatacaattcatgctatctagttcaacatcccaagttcacgtatgtgctacgtagttgactatcacctgatttaaacctgattgattgattgtggtaaaatgttataacaatgatgttatagatgattatttgcatgctgaaaaaataattctagtaacattgctaaaagtgtttttctcccaaactggttaccaataaacggagagagacaagtcataaatcagggatttcatattgactaaagtattcttaataaatttcctcatgagaatagttctcagattgtggttaatggactatttgtagctgctggtagtctttttttctgtagatttggcttatatgatagtatccaaagtttttgtttatggtacaagctaatgatgtttttgtggtaactccaatttgtcccacaaaaagcaaatattagttatcatttaattcttctggatggttttgcagagacaaataggaatggacaggtttgatgatgtgtattgaaagttggactcagtttatgtattatatgtatagttactctaaacctcagtttcttattattttctttctttgtgaggacaagggcagaaggaatagtgattaaacaaataatattacattagctaggtcctagagtaagcaaggcaaaaacttgcaaatttgcagagccaagaatattgaaatggaaatttagttacatatcaataactttaacttttttttggtgtgcatagtaattggtaagaaatatggttgtcttatggtaggtatttttatattcacttctaattaataaaaggctcttatttgatacaaaagattaaaggattgttaccaattcatcaataaaatgaattttattattcattctaagtctttgaaactatggattttagtcctcagaccaaaagtattagatttttttgtatccctcgtgccattattatttgtaactggatttctgttatctttcgaagactgaacttcagtcattgattttctaagagttttatcaaatgtcatcatttatgattactttagtttggggaagttctatcctactcaagacttataaggggagcatattacttccaacaatagtggtatgaaaagttttaaaataaatctagttcatgtttaaagggtaaaaggcataaacacctgaaaagaatgctattaagcagctgtaaaatgtatctctgtgttgagtataatgccattcacataaaattatttctatccacctagctatccccttttgatgtatatgcatggagatatgtttgcattggtgtttaccattgttgatattattatctctgtagagtaagatttggagagtagttttgtttttgtttttggtagctatcagaattgtaatttgtttatacctaattacttgtgtttaaagttgtctcgctatacttttttttccagactgtacttgtttaacttcagataagtaaaggagaaaatattttatatatttttttttcagtgattattttttagaagcatagcactaggttgttgaagctaatgcttaaaaatgaaaactccccatgcctgtgccagtataacatctttaatcagtctgttttattccatataactcgtctccattgacctcaatatgctattttaatttaacagggcttacagagtcatttgaagaagtgtggtgggaaatacaatcagattttggcatttcgacctacaggatggacacactctaacaagttcactagaatagcagatgttattccccagaccaaaggaaacatttcaatatatggtatagttattaaattttctcacttttagtgtttataatgtttataattacattttaaaaaatgtaataaggttcaaatccaacaaaaacaggcaccaaagaatttaataattcaagagttttcatctctctacaactctaatcctgtatctagtccattgtaaactgatataaaggagcttgactagtagatagacattaatgaatacagatcatttcactttgtgatcagtgatattgagaggaaatcgcagaattaacttgaaaggactactgtggttgtatactggaagtatagatgacaatgtgagattgggagcgggaagatgatgggttagatgtggtgacagcaggagatacagacttgcctgttttcatccttgagggaggtttactactgccttctgagttggcttattgcagtgacagctgatggaaacatgtttggggtgtcaccagaccagtgatttaccctcagcctctgaagaccctagtatactgaaaataggacccttttcacctttctctgtggtacttgatcttcaacaaagaagataaacggtgtgttattttttctttttttcctatttttttatgtgtgcaaagcttggggacaaatctgcttacctgctctggaagtgagagtctcctgcttgttattcttcacatttgactcatatttcttccatattttcctgaaacctgtagctaagtaaagtgtctaaaggaagaattgtttaataagaaaaacctaattaaataggactctctggaaatgcatgttattaagtatacacgcaataaggtaatcgatttttgaatgttctaagtttcatatctgtattagtccattctcccactgctttaaagaactatctaaaactgggtaatttatgaataatagaggtttaatagactcagttccacaggcttaacaagaagcatgactgggagggctcaggaaacttacaatcatgacagaaggcaaagggcaagcaagcacatcttacatcttatcctagcggagtaggagagtgagagagagcacaaagggggaagtgccacgcactttcaaaccatcagatctcctgaaaactcactatcttattatttttttttaattttttgagacaagagtcttgctgtgtcgccaggctggagtacagtggcacgatctcggctcactgcaacctccatctactgggttcaagcaattcttctgcctcagcctctcgagtagctgggattacaggcatgtgccaccacgcctggctaatttttgtatttttagtggagacggggtttcaccatgttggccaggctggcctcgaactcctgacctcaggtaatctgcccgcttcggcctcccaaagtgctgggattacaggcgtgagccaccatgcctgaccaagaactcactatcagaagaacaacaaggggcagatctgcccccatgatccaatcgcctcccaccaggcccctcccccagcacatagggattacaatttgagatgagatttgggtggagacacagagccaaaccgtattggtatcattttaatgtcttaatctttattattcataaaagatatcaacaagttttcttttcagaactaaagcactgaggggtttttgacaaaaatactgtggattgcttttctcttttgttttattctattttattttaggattgtgaaagtttaaattagtttgattttagtgtacaaattcgtttattttttgttacaggaattccttacagtgaacacagcagctacctagaaatgaagcgctttgtccagtggctgaagccccagaaaatcatacctastgtaaatgtgggcacctggaaatctaggagcacaatggagaaatattttagagagtggaaattggaagctggatattgatgatacctccgaggattcagtagtagttaagttccttggatgtagcttgttagtagttaaatctatagaaatgtgaaatacactttgtgtggaaaaacctcatgaagattgttcagatactttattttctcatttatgtttgaacaacatgttcgtggtgctgaatgcctctcagcatcatcaagrataactgaaactgggtctccctgggacccttaatttcttgtcccctgccctccatgggcagttatattctgcatcaagccttagaagaggaagcaaaggcagattcagggaccaaaaggattaatgataattaataaagtagtttgaagcattatatatataagtaattatgtgtctttaaaattatgagatgaaacttttatatgacgtgtatacttaaataaaattaatataaaatttgctctggtgtcttttgttttttttgtttgtttttaatagattttattttatttatttatttatttatttttgagatggagtctcgcactgtcacctgggctgtagtgcgatggctcgctgcaacctcccgggagacctcccgggttcaagtgattctcctgcctcagcctcccgagtagctgggattacaggtgcccaccaccatgcccagctaattttttgtatttttagtagagacggggtttcactatgttggccaggctggtctcgaactcccaacttcatgatccgcctgccttggcctcccaaagtgctgggattacaggtgtgagccaccgcacccggcccaagactttattttttagagcagttttaggttcacagcaaagttgagtagaaggtatggagatttcccatatacttcctgccacccccacatgcttagctcccccgtgatcaacattgctcacctgaatggtacatttgtgacaagagatgaacctacgttgacacatcataatcacccaaagtccacaatttacattaaggtcactcttggtgtcctacattccttggtttgtataatgtataatgacatatccatcattgtaatatcctacaaaatttttgctgtccccaaaatccttttttctctgcttattcatttttccatccccccaaacccctggcaaacagtgatctttttgctatctccatatttgctttttctaaaatgtcatgtagttggaatcatacaataggtatccttttcagattggtttttttcactttgtaatatttaagggtcttccatatctttttgtggcttgatagctcatttatttttagcactgagtactattcctttgtatggatgtatcgcagtttgtttatccatcatctactgaaggacatcttgattgcttccaagttttggcaatgaggaataaagctgctataaacatcctgatccaggcttttctgtgggctaagttttcaacacctttgggtaaatatactacccagcaacctcagtccttgataagagtatgtttgctcttataagaaaatgccaaactgtcttccaaagtggctatacaattttatattcccaccagcaactaatgagcattactgttgctccacatcttcactagcacttggtgtcagtttcctggattttggtcatcctcttaggtgcatagcgatatctcatttttgtttttatttgcatttccctaatgacatatgatacggaacatcttttcatctgcttatttgccgtctatatatctctgatgaagtgtctgttcagatctttggctcactttttaattgggctgtccattttcttattgttgagggtttttaaatttgtattttaatttttcttattttttttaaaaaaatacagtactttgagttgctattttattttatttttaagagatggggtctcactaggttgcccatgcaggagtgcagtggctattcacaggtgcgattatagcacagtacagcctcaaactcctggcctcaagctgtcctcttgcctcagcctctggagtagctaggactactggagcatgccactgcacctggttattgttgagttttaagagttatttgtttattttgggtaacagtcctttatcagatatatcttttgcaaatattttctcccagtttgtggcttgtctgttcattctcttagcagtgtacaatgtcttttttttttttttttttttttttttttgagacggagtttccgtctttcacccaggctggagtaaagtggcacaacattggctcactgcaacctctgcctcctgggttcaagtgattcttctgcctcagcctcccgagtagctggatctataggtgcccaccaccacgcctggctaatttttgtatttttagtagagatggggtttcgccatgtcggccaggcttgtctcgacctcctgacctcaggtgatccacccgcctcagcctcccaaagtgctaggattacaggcgtgagccaccgtgcctggcctacagtgtacaatgtcttttggagagccaaagtttttaatgaagtctgtcttatcaattattcctttaatggatcatgcctttggtgttgtatttaaaaattcatcttcatacacaaggtcatctaggttttcttttataatgtctcttaggagttttattgttttgtgttgtacacttagatctgtgatccattctgagttatagtgtaaggtctgtttctaaatttattatttggcatgtggatgtccagttgttccaacatcatttgttgaaaagactatcttttctccattgcattgctttcattcctttgacaaagatcaaccaaatatatttatgtgggtctatttctggactcttatttgttctttcaccaataccacactctcttgattactgtacctttattttaagtcttaagtcaggtagtgtcagttctctaacttttttctccttcagtattatattcgtttttcttggccttttgcctctccatatacactttagaatcagtttgtcaatatcctcaaaataacttgctgggagtttcattaagattgtactgaatctgtagatcaagttgagaagaactgtcatcttaacaatattgagtcttcctacctataaacatggaatgtttccatttatttagttcttctttgatttatttcatcagttttatagttttcctaatatagatcttgtgtacattttgctagatttatacctaactatttcatttcttttctgctaatgtaaattgtaacatgttttaaatttcaaattgcatttgttcattgctggtatgtaggaaagcaactggcttctgtatactagcttgtattcttcaacctttgtataatcttgatttcctatatagacagttacatcatttgtgaacaaagatggttttatttcttcattctcaatctgtatacattttacttccttttcttgacattgcattagctaagacttccagtataatattgaaaaagaggggtgagaggggacatatttgccttattcgcaatattagtgggaaagctgctagtttctcaccattaaatatgatgttagctgtagggctctttttagatattctttaagttgaggaagttaccctctattcctagtttactgaaagtttttatcatgaatgggtgctggattttgtaaaacgcttttttttttgcatctatgatcttgtggcttttcttcagtcttttgttgtgatacattacgttaattgattttcaaacgagctttgcatacctaggataaatcccacttgattatgatttataactctttacacattgttggacttgctgtaatattttgttaagggtttttgtatctatgttaatgagagatattggtttagagttttcttataatcactttgtccaattttggtaatagggtaatgctggccttttagaatgaattagggaatattcctctgcttctatcttctgaaagagattgtaaagaattggtgtaatttcttccttaaatgtttagtagaactcaccagtgaactgatttgagcctggtacttcatgttttggaaggttgttcattattaattgaatttctttaattgatatgggcctattcagattgtctatttcctcttgtgtgagttttgacaggttgtgtctttaaagaattggctcatttccttgaggttatcgtgtgttttgcttttggattttaggatttatagctgtgacattcatgaaattttacagaatctcagtgaaaataattcaacttgtggctttgaacaagacaattcaaaaagcttagataatcacccaatagaggatgcagaaaagtttgcatgtttatctgaactattcaacttaagacatcagataactaaaagtttaagttgcagtgttttatgtaaagtgagattatagaatttatttatggatcctaatctctccaacatagactgaatagttgatccaaagtgaaaatttgcagccaatgcatattaaagatctttttatgtggtctaaataagacaatagctagtacaatgaatgtatgcatgtgtgtatttgtgtattcttgcattagctctagcaacgaaattaaggaatttcttaatgttttcatagaaatagtcatggaacattttcagtaacaatcagaaggatagtattctccatgaactttatttcatgggtttggattttactttgtagaggtaagaattataggggatcacatttagaagaatagcagcttttggggggcacagtggtagtgtttatgttctcagttaaattacaaatttaaaatattttagcttgtcttgatgttttaaactttttgtaagctattaagagttataattagaaaaactttatatttctgtaattatagatattcttaacataagggagatagtcaagtcgtctggggttatttttatttattaattgaatgatttttcccactagaattgtcatttttcataggtaaaaagattttttatgattttgaacgtttttgaaaatccaagcatgttatttcaagagcagcctcagcctcagcctttttattattctatgcaaaaacatctttctacgtgaaaatcatcatttgtggcagcttggaataatgtcccgctattgctggacataccaaattaagtacctcatttaagggacataccaaatagtgttataaataagtcacaaccacaactaaacttttctaggttctattgacagcatatatgaaattcttagttctgatacaacattttggtaggtaaaaattttccatttttaagcgaaatgaaagaaaaagaaacctaccaccaacccaaaatatctggcagctcttaacatcctaaaatatgtggagagaaggggaagtagaatcaagccaaggtgggggtaatgttttgctttatatttacttggaacttttcagaaagcatttttgttttttagatggagtcttgctctgtggcccaggctggagtgcagtggcgcgatttcagctctgcaacctctgcctcccaggttcaagcaattctcctgcctcagcctcccaagtagctgggactacaggtgcacggctaattttttgtattttagtagagacggagtttcaccatgttgcccaggctggtcgcaaactcctgagcttaggcaatctgctggcctcggcttcccaaagtgctaggattacaggcgtaagccactgcgcccggccttcagaaagcttctttacaagcttatctgacattgaacattttattaccaggtgtagtgacacttgaaagactgatttcaaattgttttaactttgatctaatgggaaaacctttcttacttaatgtcaatgccttttacatttaaattatcacttagtctatatttaataatgtacctaaatatgaaatttctcttttggacaacaaatttaattttaatttcaattttaaatttcattcaaatttaaaatttaaatgagttgtattcccatggctcaagtgcatccagaatttccttattcagtcttgaataaccatcaataactacactaaggaattaagaaaataatcttcaggtgctaatctccaaaacaatctgtcttagagtgtcgatattagcttgtaacttactgtttttttattcatttagttcatttggtattgatcttagaaaaacgatagggttggttgtgtccccacccaaatctcatcttgaattgtagtttccataatccccatgtgtcctgggagggaccaggtggagataattgaatcctgggactggtttccctcatcctgttctcatgatagtgagttagttctcgcgagatcctatgcctttatatggggcttccccctttcgctgggcactcgtcttcttccttgccgctctgtaaagaagtgcgttcagccgtgattgtaagtttcctgaggcctcc

SEQ ID NO: 6896 - DNA, 66505 bp, Homo sapiens
catgaagtatcacaaaagcaaaggaaacacatacaaaaaattgtctcatacacacacacacacacaatgggcaataaacacaaagttcaaaaacgttgtctttgttgatatatcgagtattgacatttcaacttaccaggtattttcttatagaatggacatgtcttttttcttgatcctcctacattagatgactctgggattttcttgttgcccctttgcagcccaccatgagctgattttgtgaagactttgactttacttaaattgactgcttcagattctgtattaataaggtgatctgatctcttctgacacgctccttcctgcagtgaatttgactttctacatctctttttttgacgctgtgacctctcactagaaagttccacagaaagctgactctcatgtaaagtacttgcatcaaattctaaatcacttaaagatttttctgctttcctcttgcactgcgaggacctcttttgattaggacttggaactggatttaagtttatcccttctaatgcactttcccctagcaatttctcttcctttcttttgggaggtagtccaaaatacacacctatatccatttgcttcattaccttggtagaaggatgtcttgcattatacttaagaccagaaggcaatattttcaaatacttcggagcaggtgtactagacaagttttctgtatttaaaattgtagctttaccaactggcacaccctctaatgcctttctgcagaaacatgctgagttagtattattcttagcattcaagttctcacttgataattttctaattgtattttgggttggttgggaagaaagatacccttctacctgactttcaaaaggtttcaacattaaactcttaactaacggaagagaaacttgattgtaaacagatgattcttcaattacctgtttctgtttatttgattgagctgagtgaaattctggctcatcaggttttgctttagttgcctgatgaacagaagcagcaagcttccctgccaatgcaggtggaaacaacacaaaatcaccaccagtacatgccagatcataaggcaaagtactctcattattttgagaaataggttgagacaaatcatttagactattgaatctatacaatccttcatcatacttatcccgagttaagaagctgttcactttggggcagctctcatcctggtccttcagtaagggaccatgtcgttttttaaaaaaaccacagctgtcatcatcttcttcgaggctgccatcttttgagctttcggtaaaaaacagttgttcttgtgaatcatscggtttttcatcgatatcatgagtgtcttcatcactttgaagtggagaataggagatttcacagtcactgaagtcattttctggcaatggcaaatttatgtgttctgagttgtttgcaagacgcaaagcaactcccactagtttgtcattctcaacaaaatctgtaaattgtagagcttgttgggatgtttggatatgagtagaaatcttttcactggcttcagtcagagacggagactttttaaaatactgtgtcatcaataagggatcatttgaaaccgagttatcagtttggttctgatacgaagaccatctttcctcaaggctacaaaggacgcctgacttagtctcactgaaactgccacctgacgcaggtgatgggctgctaaaaggatgatcaccagccctgctttgagctagcaggaagtgagtgtatctcttgtaatgaaaaggaatggttgaggtacacagaagaccatcaggacactctgaaattttaataaagaaaaaatattacacgatcaaagcatagactaagctttgacaacattagcagtataaattgggttccattatttaatatccacattgcatataataaaaagcaacaattttaataagattagttataattgttgatacactgaacaagttttagattctattctaagaatagaatttgagaaattggttaattataaggctttactaatttggaaactattccctatcatactaccatgattgagaaactttctataagccatcttggtatatccctgtgtatgttaatttccagatttatcaaaaaatgacacctccctcccctcaaaaaagatgttatatttgttatattaaattagaaaacttcatggcttacaacctaacttaaaaatgcctcttaaaagcatttgttatagaatggaatttaattcaagagccatctgagagtctactcaaaggagtttagtgaaaaaccaaaagaaaaattttttgaggtggcttcatctatatgacattttaccctaaggtcttcaaccatggactccaatttccattcttgattttcaagttacatgaaagaaaattactagcaaatttgtgaggttttcacttgctatccttttctgggaaaggctaatgccaaatttaaagaagagttgttttttttctgtatcttcatgcagtactttaaaataactacaggttaataataaaatgtattctgaatcatagctaacatgaaagccatattgagtatttttttattttactgaattttaactttttcagattaaaaaaatccatatatggaatataaatgatttcaaaatatataaatcatcacaacaacctgttctccatatgtattccaagtaggattttctacattaaatacttattacatattttaaaagataaaaaacatagcatacttttattatcatttgacacgttttttgttagaatcttaatcacctaggactccttcacagttcctcttcctgtatacatagcacgatgactaaaacataaccatatttagaaaccacattatatctatacttttttttttttttttcagacaaggtctccctctgtcgccccacccaggctggagtgccctggcatgatcacagggccctacagcctcgacctcttgggctcaggtgatcctcccacctcagccttccaagtagcccaccacacctggctaatttttggtaattttttttgtaaagatggggtttcaccatgttgcacaggctggtcttgaattcctaggctcaagtgatccgcctgcctccacctcccaaagtactgggattactggcatgagccactgtgcccagcctatttataattttctatggagttccataataaccaccaactggggccgggcgcggtggttcatgcctgtaataccagcactttgggaggccgaggcgggcagatcacgaggtcaggagatcgagaccatcctggctaacacggcgaaaccccgtctctactaaaaatacaaaaaattagccgggtgcggtggcgggcgcctgtagtcccggctactcgggaagctgaggcaggagaatggcatgaacctaggaagcggagcttgcagtgagccaagatagcgccactgcactccaatctgggcaacagagagagactccgtctcaaaaaaataaataaccaattggacaagttatctgacttttaagaactttcatctataaaatgtcaatactagctaccttatatggtgattgtgaaagttgggtaagtagacagtgtgaaagtacccagcatagtaaggattcagttaacatttatggaaaataatccagatacttaggaacttttatgaaataacacaatgtatttaaactgttttctagtctgccatttgctttacaattataccgttgactggtatggtgtttcccagtgtctcatctctcttttaggttactgcttgccttccttgtttcactgaattggtatgtctgacctaatgaagactttttagattatttagaaactactacgttttctgcagtcttacctgtttcagagcgtggtggagaatccaaacattcaaaaacatgccatcgaggtgtctgccctatcaatgaggaaaaaggcatctggcaatttggacagtatccatcataaactggacgtatctttggggacacgtgttggcttttttgagttctacagagttttcctggagtagtttccttgtctygggtctgctgaataccatctccacaacttgaattctgactagaagcaacagaagtctgacaacctgcatttccaaggggcacttcatggtccttcacctctttagcttctgcggctctttttctgtttctactccgttttgactggtattttccatctgttgctttttcaacagattttagaatatttttagagccattatttggatcaactcgttttggttttcttttagatttgtattcccaaatgtcttcttcggaaatgtcttctaacatggcaaaatgattttatcattcaagaagtattaatcttaagtaaactgaaagtccatttcttgtcacaaacaaaaagttatagaattattttgctgagaaaaaaaacaaaggtaacaaaacccccaccaactcaatgggaatctgcagtgttggtaatgaacatattggcaagctacaaaccttgtacctgacaacacctgctattccatttataccacaatgaaactaagataaacctatcacaggagtagcaactgtgaagttctccattatgggtgctatttcattcaaatatcttgtccttttccagggcttgattcataaaaataatacttcaaaaattaagcgctaatggcaaatataggttcaacagcttaatcttagaacgagatttgtaacattgttatgaagctactgtcagttctttcaagtggacaaccgtccaaataattcataaatccaaccacagtccctggacaaagggcttaacaggtatcccaaacactaaatgactatctaacaaaactagtcacaacataatcaaagagatgtgtaattcgcaaaaaactgcgaagtcactgccctcatccacgactagtggatactcaaccacttcagtttcccgcgacagtccatgatcttcctccagcagcaatgaacaatccctgcgcagtgaacaaaaaaagttgatatgtgaaaaaagttcaaatatgtgaaagagtgggcttgtattgaggtctgactccgtattgcacccatggttccgaaggtggccagccctctgtccacctgactcaaaacggggtcacacgccagcctctcccttatcttttggcattagaggctgggaggccaggaagcggggccttaatcatctccaggttaagcatagcgagctccaaaaagccctcagagtcctgcccttctgaagactctaaggcccgccctcaaggaccctcaccgccccccacctgccactcggcaccccaagggagccgctccagctgcatccgctcctcccggcacccccatctaaaaatgtgttcgcgcccgcactttcagcactcccagatgacaaaacgctgtgtttgtgtataagtgaaagccactcgcgccagtcacttccagtttacaaagccttctctctggaggttatccctacccgctttacctttagggtcttggcgggaacaagttcccgctgccagtgccgtgtcgaatcggcggatgctgttcaaagagagagactttaaaaataatttttaaaaatacattgcccttttaagtcctacggatttattgtattttatttgtgttcgaaagtccgctaattcccaatgtggagggttggggatgtttcccttagcgcctctgggacgctgtccctaaggccttattccatgttgaatctgacgctctcaatgtccaggctcggctgcggcgtggggaccgaaaaggggcggggtgggtcggacggcagtttaattacgtccccgggaactgcgccgatttggacttttggcacttggacctatgctttaaaaagaaaaaagtgtcattggcgtggagtggggctagtggagggtgaggtgaatgcgccgtttggaaaccacaggacagtgaacgtttcgtctctcccagcgagactctcccgcgggcccggcggccgcatcgggagcccggcggaaacatggcggcgcccggaggccggggccgcagcctctccggcctgctccccgcgcagacctcgctagagtacgccctgctcgacgccgttacccagcaggagaaggacagcytggtctaccagtatctgcagaaggtggacggctgggagcaggacttgtcagtacccgagtttccggaaggtgaggggctggcgtcggggtgggggcccctcccggcacctccccttcctcggggacggcgccctcccgcgaagcggtgggctaggcgggtttgtgccgctggcgccccggggagtggcccttcgcctaacttgggccgctgttcgcgtgttctgcaattcccaggggtccccaagcggccaccgacgggggtttccctggcacggggatccacatactcgtctgtgtatcctgagttccgcccgcgcctgatattagccaagtggacactccgtgaatatttagtgtccccggtggcaatgattgcaacgtccacaccattctgtccrttcaatctggttccccagtgtcttctggtcatctttctgcatcatcttgacatttattgatcactttttcatgtatcacacacagggtttttttttgtttttttttgatacggagtctcgctctgtctcccaggctggagtacagtggcgtgatcttggctcactgcaacctccgcctcccaggttcaggcgattcacctgcctcagcctccggagtagctgggactacaggcccgcgccaccacgcctggctagttgttttgttttgttttgttttgttttgttttgtttgtatttttagtagagacggcgtttcactatgttggccaggctggtctcgacctcctgatttcaagtgatcctcccgcctccgtttcccaaagtgctgggattacaggcgtgagccaccgcgcccggcctgccacacacagtcctaaacacttgaggggatacctaaacacttgaggagatattaccttattcaattacctctatatcccagtgaggtgctcctatcattcccctttcacagttgaggaaatggaagcacagagaggttaagtcacatgcccagggcctcacagctgataactgccccagttggattatacaggccctggatttgctggtttcttagctgtactgtgcttctccgttcaaagtcgtgaaactaatacttttaaaaatcggaatcaattatagcctatttccagggtttaaatcctggccatgtgagcttttggagcatgaaggaacagatattcccggcagggatgtttgtgaagcatatcttgccatgataaatgaaaacgtattttaccttctttggatgggagtagcattgctttgcctgatggtgctggcatgtgtcctggcgtgacactgaaaccacatgtatagttaattggttggatgtggcagaattcagttatctcatgggaggtatatcggaacctgcctccgacaacagagtattggtgtctttccaagtcttttgcactactcaccttgagaagtgcttatttttcctgctattaatcttatactggatttgaaatattgtggaattcttacaaaagaattgggtacatgaatgcttatcccatcaaataaactttaaaagattgtttacatctatacaaatatatgattttaaaaagttttggtgcagaaggtagttatatagtaagtacactgttataaacaagcaggccatcaactgggatttggggaatgttttttattttctagtcttgtttgtatttacagggagtgtattttattcccatgagatttgacctctgtgactcataactaaaaaaacatataataaaatattcaggctttgtgtttaacacagtatgattttctcctggacccgattattgaggacagaatgctagaaatgactgttttcttggtttctttagcagtaaactataatcaggaagtcataaacataactttatttgaaaaactgtatgctttgttcatttcttagaagacttacatgtttataggagacagtgcagtgtaatggatagattcacagagacctggaattagatccttgttatttccattttgttggttgtgtgattttgagcaagttacttgacctcaaagccttatatttctcacttgcaaaactgaactattatttacctttcaggattattatttgtattgaaagtaatatatgtaaaattcttaattcacagaaaagcttactaaatgttagcagctttttattgtattcattgtaattattgttattgtaaaataaattttattaagcctggtaagtatctagcacggtgactaagatgtagtcattctttctataccccctgatctaagccactcttgactatttacagaaaagtcacagaagacagattaataaatattttgcaagtaggatatgaaatatacattaattagtctgaagttttgtatgatcacttgatctggtatataattaatattttaacaaaatggataattaagaggtcactgtaccctgaaacctcattagtttggactaattggcccaaatactagtttgatctgcagatttttttttctagaattttgttatgattgagtaacaacagttattgttgttaatcattagctgttactgtttacttcttcctcccaagtttggctttcagttgctaaaagctattctaaatacctgcttcaaggcataattaatagttgtaatagctgcattgarttatttataagcagtaaactttgttttcttaaattggttaaatagggatgctgtactttattattagttaacaaaatctttcttcatagtacagagctttctttttttggaggaaagggaacacgttcttcattaatattaatgttacctcaatgaaatctgtgacaataataagtgtattttgcttaactttacatttagcatattttattttgtatttacggtctcatccaaatccagaatatttcagtttcttctcctttaggaaactgttttaggcattttgtatgtttatccttacacacatttcactcctttttgatgtttagttatatcttactattcttaagcttgacctttattctcagtagcccatttgtatctaattgtttatgtaattaggttcatttactatttgatatttcttcctttttttttttttttgcctaagtgtgttgcctttactccttttcacagactgttaccctatttctgaaagaatttagtagctttttcttgctttatttgcagatggcatcataatagcagctttcccatcctctactcctcctgctcccccacccgtacccccatcccttccttttctttcttccctttttgggcttttaatctctgctaatttgcctttttggtatgttcttccaaacccaaatacctgtttagttacagtcataaagatatatcttttatttcttttgttgatagaaaatgatggttcatagtaaacaactataaatacatgcaactgccacagcctttatatggtgctactctctcaaagtgtttatttgcattagtcttaaaaaaaaaggtcacattttaatggaaagttttaggtaaattttatcyttctctttaatcattgtaatttattttatgtaaatttcaggattagaatggctgaacacagaagaacctatttctgtctacaaggatctatgtggaaaaatagtcgtccttgatttcttcacctactgctgcataaactgtattcacctattgcctgatctccatgcattagaacacacatactctgataaaggtatctgctctttaattagtttctaacagactgtcctggcatagtcactggaagagtggctgactcattagctcataggagaatgaacatttggcaaggcttcagggattctaaaagtaatctcttatctatgaattaaagacttcatgtaccttttcataaaggattaagcttagtgatagtggtttgcctatctaaagaaccagcatttagtatatggtttttctctgcggataggggcataatttgctatttttcatgatcagatattttaaaaggtctttttgtatgttgaggctgacttaaatttgttctattaaaaaaataaaatatctgaccttaattttacactgttttcactgtgatacaaaggtttaaagttcttattaggaaatgtgactaggctttcattaatattgaatgacatgaactgcagtggaatgcaaaatataacagatactctttctttgaccctgcttcattaaaaaatgatttattacagctaatgtttttcaaagcacactaggaaatccatttttatggtattacaaattctaaagatgtaggagattatacttattggctttagaagtttgaaaaattaatcaaattttttttgtctactttctaaaaaaagaacatgggagtaaatgaaattaattaaaagtatcatttaattaggttcaagtgaattgaagcactaatcttggagtggataaaaaaaagagatagggtcaccgatcctgtgttagtaaagatgagaatagactatatacgtgtgaaagtaaaggatattctgaaacttaactttaaaggggaagtgatagagaaatcttcagtgcaactgaaacttcagatgcttttgaattgtaatacattgtatgttaaaattaccagtcaaatgatttatcaagaactcaaatatttctactagctaaatcctgttattaaaaatttatctgtatggatttaagaaatatggatatcttatctcctaggttttagatgccagtgtttcttgttcaagacatcacgtttattgaacatgttgttatgtgcagggtactctgctaactgctgaggaaatatgtaacaaaattgaataaaaaacattatggaacctaaggaaaggaataagtcactttgcctagaaacattggaaaagatttctcagagaaggagacaattgagctagaacttgaaaaataagcaggagtgcagctgaaaatgaaagtggggcagaagggacactcctggctgaggaagcttcaggtaaacaagcatggaatcacagaggagtaggattcttgctccaagaacaggtaaataatttagtgtggcaagattgtaagagttcatggtaaaagtaaaaggagacaaaggtaggttaggttaggagcacattgtgaaatgcattgtatagcgttcttaatagtttagacttttccttctgtgaggatacagagattgaagtttgtttttgatttgtttttttagtagacggatgacatttgtgttttagaatggcattacacatggagttaagaatctcaaagtttaccagttccatacctaagatcacccctgaaagactatttggtgaactcatggttaaccccataccttaagcagattcagtgacttcctagaatggatccttataatctcstactagtttactggaaacattgtttttatagcacattgtgacaaaaaaattaaaaatatttttatatacaaatatgcttctgaaaagcaaaatactttgtaagtggagcaagaattcactstcagtttcaacaaagaatcacaaagcatacacaaagaacagggaagtacagcccattcaagaacagggaagtacagcccattcaaaggaaaaaaataaaccgatagaaattgtctctaaaaaatacctgatacatatctatgagacaaagactttaaaacactgtcttaaagatgcccaaataactaaagggaaatatggaaaaagttttaaaaaaacaatgtatgaagaaaatggaaatacaataaagagaaaacctaaatagaagctagaaagaaattctggaactgaaaagtggactaacagtgaggagaaactcactacagaggctccttgacttatagtgcagctgataaacccatggtaagttgaaaatatcatgaagttgagaaagtatgtttaatgcttggtagcacagcagatggtccctgacttatgatgattcgacttaaaatattttgacttgatggtggaaaggtgatactcagtagaaatcataactttctaaatcctaaggagctctttgacttacagtgaattatgtccagataaactcatcgtaaagttgaaaaattataagtcataccctcataggtcaggggccatgtagagactcgaagacagatttgagtaggcagaaagaagaatcagtgaacctgaagataaggcaatggaaatgattaaggaacaaacagaacagagattgaggaagagaaaacagagcctaaaggaccttggaacaccatcaatcagaccagcatgtgcattttggcagagaatatttgaagaaataatggttgaaaacatcccaaatttgatgaaaaacatgaacacaaacatctaagaagtttagtaaactccaagtaggatgaactcaaagagaatcacgccaagacacattattatcaaactgcctaaaaccaaagagagaattttgaaagcaggagagaagcaactcatcacatacaaggaatcttcaataatcagctgatttctcatcagaaactttggaggccagaaggcagtgggccaatatattcaaagtactaaaggaacaaaactgtcaaccaagaattctatgactggcaaactgtccttcaaagtgagagagaaagtaagacatttccagataaataaaagctaagggagttcattaatagacctgtcctgaaagaaatgctaaaggagtccttcaggttgaaatgaaaggacactagacaataattcaaagccagtgaagaaataaagatctcagtaaaagtaaataataggcaagtataaaaactagtgttactgtaacattggtatttaactccactttttgttttctacatgatttaagagactactatatttttaaaattattctaaaagctaatgttattgtaacatcacattttgttttctatgtattttttttttgagacagagtcttgctctattccccaggctagagtgtagtggcgcatctcggcctactgcaacctctgcctcccaggctcaagcaattgtcctgcctcagcctcccaagtagctgggattacaggtgcctgcgaccacgcccagctactttttgtattttttttagtagagacaggttttactatgttggccaggctagtcttgaactcctgacctcacatgattcgcccatctcagcctctcaaactgctgtatgggattaacgccatgagccaccgagcccggcctattttctatgtaatttaagaaactaatgcattaaagtaattattagtttatatatttggagatataatgtacaaagatgtaatttggggccatcaacaactgaaagggatgggatggaggtgttaaaggagcagagtttttgtgtgttattgaagctggcataaattcaaattagagcgtaataactttaagatgttaaatgtaattcctctggttaccacaaaaaaaaagaaagaaagaatatacacaaaatgaaataagaaaagaatttaaatgtttcactacaaaataaaaatcaactaaacaaaaaaaaaaacagtaatgtagaaaatgagggacaaaaaagctctaaggcatgtagaaaacaaatagccaaatgacagataagtccctctttgtcaataattactttaaatgtaaatggattaagtcttctrattgaaaggcagaaattggcagaatgaataaataacatattccaactatatgttgtcttcaagagactcactttagatccaaagatacaaacaggttaaaattgaaaggatggaaaaggatattgtatgcaaattgtaactaaaagagagctgggatggctatgctagtatcagacaaaatggactttagatctaaaaaggttacaagagacaaagaaggacattatatactaataaaaagcccaagctgagcacagatttcacctgtaatcccagctactcaggaggctgaggcaggaagatcacttgaggccaggagttggagaccagcctgagtaacatagcaagacctcatttattaaaaaataaattaatacatagatgatatgattataatgataaaatgattataaacaggcacttaataacagacaaaatatatgaacaaaaattgacagaattgaggggagaaatagacaattctacaatagtagttggagaattatacccaatatatacaggacactctccccaacaagataacactacccaacaacaacaggattgcgtatgggacattttccaggatagaccattagttatgccacaagttaatttcaatagattttttttaaagataaatattaaagtatcttttctgatcacagatgaagttagaaaacaataaccaaaggaaaattggaaaattcacaaatttgtggaaatcaaacagcacactcttaaataaccagtggaccaaagaagaaaacacataggtaattattagaaaatacttagagacgaatgaaaacacaatgtaacaaaacttatggcacatggtgaaaacagggctaaggaagaaatttatggttataaatgcttatattaaaaaacaagaaataacttaaatctaaggtgtaatatcttagaattttacaccttaagaatctagaaaaagaaaaacacagtaaacccaaagctaaccgaaggaaggaaataaagattcaagcagggagaaacaaaatagataatagaaaagatcaatttgggtacaaccaaccaaaagttggttctctaaaagtaccagaaaaattcctagacctttagctagctagactaagaaaaaagaagactcaaattattaaaatcaggaatgaaaatgggaacattactactgattctacagaaataaaaaggattataagagtactatgagcaattgtacattaacaaattggataacctagatgaagtagacaaatttctgaaaacaaaacctactaagactaaactatgaagaaatagaaaacctgaatagacctatatctggtagcattattctcaatagccaagatttagaaacaacctaagtgtccattgatggatcgtgggtgaggaaaatgtggtgtgtgcatacagtggaatgttattcaaccttggaaggaaattctaacatggatgaactttgaggacattatgttaggtgaaaaaaaattcacaatttatgccacttacaaaaattcaaatactacataatttcacttacacagggtacttagagtaatctgaatcatagagacagaaagtaaaatggtggttgctagtgactagcaagaggggagaatgtggagctattgtttaatgggtacattttcagttttgcgagatgaaatgagttccggagatggaggatggcaatggtcgcacagcaataggaatgtcctaaataccttgaactgtacacttaacaaacggttaaaatagtaaatcttatggaagaaactataagaacacaaaaatgagccaggcgtggtgtctcacgcctataatcccagcactttgggaggccaaggcaggcggatcatgaggtcaagagatggagaccatcctggccaacatggtgaaaccctgtctctactagaaatacaaaaattgctgggtgtggtggcgcgcccctgtaatcccaactactagggaggctgaggcaagagaatcgcttgaacccacgaggcagagattgcagtgagctgagattgcgccactgaactctagcctttcgacagagcaagactccgtctaaaaaaaaaaaaaaaccacacacacacacaaaaatgggtttttaacaactattttaaaaatgaaccttacaaggtcagaattgtgcaccactgggagggttacactcagtggtttgttggagctggctcctgtaggctggtgagagccatttgttaaatatgtaagaaattttatgagccagtggtaatcttgaaatcagccatagtgggagtatttagaccatggaaatcaacaaatgctacaaatcagaggttttttggttttttttttttgagacagagtcttgctctgtcgcccaggctggagtgcaatggcgccatctcagctcactgcaagctccgcctcccgggttcaagcgattctcctacctcagcctcccgagtagctgggactacaggcgctcctcaccacgcccagctaattttttgtatttttagtagagacagggtttcaccgtgttagccaggatggtctcgatcttctgacctcgtgatacgcctgcctcggcctcccaaagtgctgggattacaggtgtgagccaccgcgcccggccacaaatgagaggtttttaaaaatcgcttttcatcccccccccccgttcctctcaccatataatagagctggtttattagcatattactgggtatgatttgctggcccaataactcacttgttaatgtggtggagaatactgactagtgtttttctgtatttggcttagaatattgtttgtggaatatatttcttttttagattaccgtagaactttttctttaatttgccacaggtttgtgaagaatattggaaaaaaggaaaagcacgagaaatagttgagaatgccattgtgataagtgttcacagaggctttcttttcttttttttttttttaatataacttcgacttttttttttttttttagtttaagttctgggatacatgtgctgaacatgcaggtttgttacatagtggaataaatttttaaccattaaaaaatattttgtaagtagtctcaacattgtatttcaaagaaacattgcttctgtaatatgctactatgtgaaaatcctgataacttaaaagatttttatattgattagaagataagttcagttcatattcataaaagcagacataaccagaaatgatcacatggcagctcaataagctgtcactaagtcactaaattgaatttgcttttttgtagttaaatatcttctcccattactatttgatgtacttctgaatgtatctgcagcagtgctatttatgttctcgaagtgacatttggcagtatatttaaaattccatgaaatgttctgctcattttaccataaagccaaaaatgctccactgaataaggaagtgtttattaattcaaaaccttgaaagaggcccaatttcataatcaacttgcttcctctaaatcagcttttaaatgcaggtttgtaataggggccagtgccactttcacagtcgcaaatgagaaatcgcaaatgccaagaagtttgaaagcaaaaagcaaaacctacttaataggaatgaattgttctgatgtttaaacatttttaaagaagcaactatgccctaagattgttattaattaataataacttagtacatatttatgttaaactgcaagtgatattttaccattttctacttgagaacttctaagttttttatttatggtgtatacattaatggtatgttattatgtagtactgaaattgaacataatggctattatctaaggaaaagcacttttgttttataagaaaacttctattaggaaagccttgtgtattttaatgtgattgctaggtgtatgttaatgtataactaagtcagacttctaaaaatctgaatttcttattactattgagtaaatgctagtattatcatatagtatatgcttttttctgttttatactttattaaaaattagaagaatgcacttttaattttatagtaaaataagcctttaaataagtctatatataatttcactttgtgtcattgttctcaaacctcgcctgcccgcctccccgcctccacccccggctccttcaccaggtttgatagttttcattaggagtactcacaagattcagcatataattgtactcatgactatattatagcaaaaagataccaagcagaatcaggaaagggaaaagatgcatggggctgagttgaagggagaccaggtacaagattctagagtcttctttcagtggagtcaacccaaggtgctcttaatttcctcagccatgtgttgtgacagcacatttgggatgttgccaaccagagaagcttagaaataaccaaggcttttattgggggctggtcatgtaggcagcttctgcctgctgtcatgtttcaaaagttcagattctcagaaggaaagcaggtattcagtataagctgtattgtttgtacaaacattttaggcaaagtgagccactcatcagttctaggaatggtgaaaaccctcccgaaatctaagctcccagaagccaggcaagagccaatcttgtttgcacaccttttaaaggatagcagtcagggctactatgttaactctttctgcacacactttatattttctttattcagtagtttgtctatttattctatgttcttaaataaagtactatgaaaacattgccaatttatggcacattttcagatgtttagtgtggacaacagcctgatatcagtgtttgattggctttcaaatttgcttctcatttatttcccaatttagtgttcagcgattttgatcctttcatttttatgtttccattgttcttagtataaaaacgaaaattttccctctccagcatcttttccacacccttctcatccttcctcaaggctgttctagcctccctggctttccttcagttcctaagtatcattgttcctcttgctttaacaccttgacacagtgttccctctgcctggaatcatcgtctcatcctttttgtctagtgaagccatggttgtcttctggatctcagaatgtctccattacaggtttttgtttttgtttttgtttttgtttttttagcatctttcgaaatgcctcaaatagtctcaatccttgcatttaactaggtttttacattgcctgtgattaaactacacgttctactatagtatatacaattgtaattgagtgcatttagaagtatacgtctctcaataagacttttgaagctttaaaaatatgtattttaaaaagtggttttattactaatattttagaagcagttatatatttatcatgttttttgttggttagtcagagacaaggtctcactctgttgcctgggctggatttcactggtgcgatcacagctcacggcagccacgacctcctgggctcaagtgatctgcccgcctcagcctctcaaagtgctggtattacaaacagcctgagccaccatgtatgtgtggtttttttattggtggtgatggtggtgttttacttcactgagaagaaggaagttacaatttttgatatagtttctccttccctcattcccttcttccttgccctcttctctccctctttcctgtctccctctcttctttcctttcttctgtattttctcttaaatggagtaattttgatccctatgttggcaaaggattcataaagggcagaatcttttacatccgcttttcagtatgcatgattaacagaaaaagctaaataatttaagaaaaatctgcatattgaggttcttacagaaamaaatgggagtggatatttggcaattgtgtttgtacgtagatcaatatagatctcctatttggacaatatgatatggtttattatacagatttataaattccttcagtatttatgtcctgtgaaatcatttgtttcctacttacgtactaggcactggagaataataaaacatgcatgggacctatgtaattagtaggcattatagtctaacaaaagaaggcatataattaaataatcatacatatttttataatttctgattagtgatctataggaaaaattacaggctgctatgatgacattatagagtttaatctggaagaaatctttcttatgaaagtaaaaattgaacttctgttctaaaagacaagcgtggctttagtaggtgagaacagatgagaacattccagtcagagggaacactgtatgccaaccctataaagcaaaaggaataatattattgaggaaccaaaggaagtcctagaatatactgcaggaggaaaagagtgtggagaagatactggagagatgagatktgttatactaggaacaattgaaagccaatgaaggattttctgcaacaaggtgacatgatcagatttgtgtttttaaaagatcagtgacttcaggatggataactacttggtgggcaagaatggatatgggaaatctgtgacaaggctgttgtgctctctgtgaataggataacaacttgaaactagtcatagctgataagagcaataggacttgattgtggattaagtatggatgatgagagtgggctgattgattactacagagatgtcctagactggttttttgcttctataattggatggatgatggtgccatgcagtgacaggaaacactgaaaaggtcatatttggaggagaaggttatgagtttagtttgaaatatctttgagacttgcccttcattctccatataacttcccatttttcttaggataaagatataaatctttaccatgacttacaagactgatcccatctgtatgtttgttctcattttgtcccacgttctccattgttctctgtgcctagtcacttaccttcttcagtttcttctatccttcctgcttcctctttgtaggtgctgttgtctctccctggaatctccttcagcgttctctgcacctaacacctcatcattcacatctcacttcagtcatcacttcttcaaggaaatgttgggatatatttatcagtaggaaaatgtgtgatacatgataacatactttatgataaatattacatatatataatgtacataaaatgtatacagatttaactcatggattcttatttaaaattcattgggttataaataattactgtgataatttattttggtattccaatggtccaagatttgactaataggatccccttcaggctgtcttctgtgatcttttggtatttctttgtcgttttttgagcccttccttactaaatacaccaaaatatttccatatgtatcttgtgtttttccagcccaaccctgagtcagctatttctttaaggagctttgatcccttttagtagggaatggtattgagaaaccaaggtctgggaactagatgtgctcattgctactatggtgtttttgcttctagtttctcaaataattcagaaattacttaggctattccttcccacttctcagcttcccccattaaattatgttattcatctaaagtatcgttagatttatttttttctatttgtatttcattttaagtccccccatctttgttgacttagtttttgagtgtgtaagacaacatggtcttcaaagtgaggatgaaacagatattcattctatccacccatcccttctaactgttcttgccttcccatttctgtcctatattttttaaaatttccttttttttaaaacaaaaggtgacatactgtagacatttttatacactcgcttttttcatgtaaaattttatcccaggagtcacttcataacagttcatagagaacttcttgacttttaaaaataactgcatagtactccgctatatgtgtgccataactcattcagccactctcctatcctgtgtgttggctcttagatcattccatatttagcaattataagcaataaataatcttgtagatatgcttttgtcttgctggtggaatcacttaaggataaattcctaaaagtggcattgctgggtcaaagttaagtacatatgtagtttcgttaggtattgcctagttcttcatcaggaaagttgtaccagtttgtatttctgctagcagtgtgtgagtgtacctctttctcagatgctgcttcaataaactgtcttgacatactttttaatttttaccaatctaatagataggaagtggtatcttggtgtaattttaagatgtatttttgagttgggttaatcttatgtttatatggctatttattgtatatgaagttttgtctgccattatatcccctaactggttattgtttgagtatataaaggctactgatttccatgtgttaattattcttgcttcctgcatcttttttttttttttttttttttttttgagacggagttttgttcttattgcccaggctagagtacagkggcgtgatctcggttcaccgcaacgtttgcctctcaggttcaagcaattctcctgcctcagcctcccaagtagctgggattacgtggatgtgccaccacgcccggctaattttgtatttttagtagagacagagtttctccatgttggtcaggctggtcttggcctcccgacctcaggtgatcagccagcctcggcctcccaaagtgttgggattacaggcgtgagccactgcacctggccctgaatcttttattatttgacttagttttataattgagtctctggacttttcttgatatactgttatagctccatatagaaatttttcagtcttatgcctctaattgatttcacttgtctaattatgttggctaatcccccacgccccacctcaatttattgttaaacaatagtagagatggtaggcatttttttccttattctttatcgtattggaagtacttctgtttttatactactggaaatacttctattttatactgtacttctgtttttataccagtttctggttttatacttagtttatttaatcaactaacaaagtatgaaagattagtgtaagtaattatatgtcaataaacctaatgattaaaaagaatctatctgtgctacttctgggtttggaggaggatggtggctacctgatcttgaatctccccactgtccctcccctctgttccaaacaataaaaaaggggagaacaagtaaaatctcacttggccctgcatttcacaatactaggagacagagaatatcatggccttgacattagatggaagttcagaaataaactaaattcccataaaggttctattgctgtaagtctgtggatgccaagaacaagtgtaggggagacttaaaagactccatgagaacaagyagagtggttcagagtatttagacaaygcacaaacagaatagtctccttacccccagaaagagaagctccaatacaaagtataaaatactgaacacaggtttggacatactagaccatatcaccagctcttacaagagtgcaggacaaggaattgaagcctcagagaagcattgctcctgggagataatcagctatataagaaagatgtggtttcccttggagataggccactgaagggaaaaaagcgtatatgaaggaaaaggtaaggttctaatggaaacaaaagagaaagaagatatatcaacccctccttacaccaatgctattcatcaatgaaactgcccagaaaaagggaactgtcagaagagggcactctcaaactaggaaccctattcgcaaaatgaacaggaatagaaaaaagcagatcacatctatataaaaactactgcaaaagaagctgaaaatgcaattcagagttaaaatgctgatacaaaattgacaaaactgtaacaccttgcttcatactggattaaatatccttagtcagcatttaggaataatgaaaaaaaaacagcttgaatcagaaatttcaaaataagaaatggacaaaaaagaaacagggaaatgagtgttaattgaatccagaaaagagaagacaaattcaaaattgtattacaaatgaaaactaaatttgaccaagggacaataaatttgtataaaaatttattaaggggcattaaaagcagggagggaaaccccagagaatgaaaatgagctaaaaaaaaaaaaaaagttaaaaggtttagagaaaaaaatgattgaattggaaaacaggcagaggaggtccaacataagactacttggagaccttcaagaaaatcagaacagctgactggaacaaatatctaaaattagaatccaagaaaactttctggaaagaaaagaaaccttgaatctacatattgaaagggcctaccaggtaccgggggtgattgacccagaacagtccaagaagtatcctagtaaaattattatactttaaacattgaaaaacaaagaacgtaacttacaaagacatgtaagttagactggccatgcttttcacaaataacgtacaaagcaaggcaacagtagagtgacatttcaggaatcttaatgagtgtaaaccataaaccaaagagattatatccaaccatttgtccttcaagaatcaatcaaggttaaagaaaaacagtttgaatgtcccaaaactcagagaatactgtgcacatgtgccctttctggtgaatctactatagggagagctagagaaccatgggtgagtagggaaactgctaatggatggatggagattttatacatgtagagctaacaccaaaactaagatgtagagttttggtatattagtcatagtttgatcagagaagcacaactgggtataataatgagagaactaatagagaattcattataggtagttgaccttatgttatkgtggagctacatggctaactagtatatgtgaggctgttgcttttgtgtgctcctgcaacctacctaagtttactaacttttcacagtcttcaagcagaggtgtgtgtgcgtatgttcttgtgctttggtttggaattaaagttgtaattactggcaaattatatctcctgatggcaggtcaggcagttgagaaggaaagatggatataaagtagcagagaacaagggcaaaccagaaagaacgtgcaaacatgaactagaacttgcaaggataaactgaaacccatgtaagctttagtttagatgatgaagtggagcaaaacactcatctggcccagaaattagagacgcggaaggaggagatctacaacccttatattcttattgctttcatttgccttgcatatctttttctacccctttacttttagtctttctgattcacattttcttagatgtatcttttatgtaaagaacttatccaaatctttttcttttaataatgagttaagcccattggtacttattcatatgactggtaatgtacaagtattatgtgtatttggttatatttgttgtgtttatcaacatgatgcactttctttgctgttttattttcataatctcttctgatatttataaatgtttacatttatcttttattaatctttgtacttacaactttaaaaaataattatagcaaaatttgttgaaattttactctacactaggtactatgctaaatgccttacacagattatctcttttaatccacctgacttataaggcatttgctgttattttcctcgttttgcaaatgagaaaacagatgaacaggttaagtaacttgcccaaggtaacaggtgtgcagtccttcccactcctccccaccacctttacccacatcccccaggcaaccattcctcattgcatcttttttcccagctgctttcaaggcatgtgtttgtgtgtgtgtgtgtgtgtgtgtgtgtgtgtgtgtgtgtgtgtgtgtttagcctttgattttcagcagtttgtttatgatgtgtctagacatggttttaatgtattttattttgtgtgtgttgagcttgaattctctaaatttatatatttaatcaaattttgaaagttgggacattactcagttatttttttctgccccaatcttatttattcactttttctgggattccagtatacttatttagatattttgaaactgttccacaggtccctgaggttctgtttattttttttcaatcttctttctctctttatgttctttagattggattaatttctgttgagctgtcttcaggttcattaaccttttctttgtcatgtcctttttgccaatgagatcatccagtgaacttgtggtatttttcagttctaacatttttagttactttttataatttccatttctctgtttttatttcctgtctttttacttcatttgtgtttttctttacctcatggagcatagttatctagttgcttgaaagtctttggtaagtcgaacatctgctttatcttggcatcggtatctgttgcttgttttttttgccccctaccttgataactgaccatatttccttgttcttttctttgaatatcaggtaattttttattgtatcctggacgttggaatgtgacgatatgtgaactctgggttctgttatagtcctgtagggaacattggtagccttattttagtaggcatcaaccctcttaattcaaattataacttctgtctcatcttccatcagctctcgctccttctgtaaacccagttattcagttatcagctccccaagcatttgctacactttttaaaatctgttccctgtactgtagtttaggggttaaacaaagacttctgagtgttcatactcagaaataaggagccaccttccccagctgttctcctcagggtttctcccacactgtccaggttatgtggtttcttgggctagagttgcagtgggatttctgttggagttttggctctccatacagctccaaaactggaacccactctcaggacaaagctaggaaaaggattggaaaagaaaataaaattggcagctcactcttctgtcatttgatcttctgtcatttgcttttctgagttttggccctsctgtacaatctatctggtcgggtttacttttctccatcttcaagcagggtgtgtcttcaagcatgcatgtctgtgttttgattcggaattgatagttataatagaagcatgagctgctgggaaattatacctcctgatttgtgtggttttatttgttcatcttgcaggtttgagtagtttttggtggatgtgttgggagatttgaatgttacttagctgttattatctctactactttggtagtcaatattgaattttttcactgaatccagccaaacactttttttttttttttggtactaatttcttgaaataatgtattgattagataagagaagtatgttttcagcagttctgtctacagaaaggcttgttctaagaaccatacaataggaattttaaataaatcaaaagccttatattatggaaacatcttgcttatatttattctgttaatctgtaatgtaaagttagattaaaaaaaaaaagacagtgatacaacaataaatacctcccaaaagcaggcatagtcaactctgaatttcaaaggggcttattataggtggaaaaaatttcaacatttattaaaaaaataaagataatttttatagcattatctaaataaaagaaaaaaagttttaatcctgcaatagccatatgaatttgatcatgtgtgtttttatgtagtaatcaagattgttatgagatttaaatttgttagttttttatgtgtgttaaaatgcagttgaagatcccagcgtagttctacttttcgtttttttttaatctatggacttttaatatttgtgatccaaaacctaatgtgtagatgatgatattcaaacttaaatatttaataatgtttaacatataattttttcctttcagatggtcttcttattattggtgttcactcggctaagtttccaaatgaaaaagtcctggataacattaagagtgctgttcttcgatacaacatcacccaccctatggttaatgatgcagatgccagcctttggcaagaactagaagtttcctgctggccaactctagtcatacttggacctcgtggaaacatgttgttttctttgattggagagggacacaaagataaattatttttatatacttcaattgctttaaagtattacaaagacagggggcagatcagagataataaaattggaataaaactctataaagattctttgccaccttcaccattgctatttcctggcaaagtaacagtagaccaagttactgatagattggtaatagcagacactggacatcatagaattttggtcgtttggaagaatggacaaattcaatatagcattggaggtaaaacttgcttctgattacgatakataaygtgttttacagtaaaaaaatagttcaaggtaaatataaaagttgaaatgtctaaatgaaaactaattatagaaaagtgatatacattgacttaatttcctaataaaaattttttgttaattaatatgatgtctgaattaacctcttctcactccctcataaaacaaacaaaaacactgaaaaagctccaggtcaaaaagaggaaatagttcagcttttaggtatatttgtatattctatctttttttttttttttaaactgctgtacttactgtttcttatgaaaacatacgttttggatttcagatgttttaagtagaagtattatgtttcactttccaacaaaatatagccgtatctttttaaagatcatgtcagtgccccatgaacttgagatgtagtttataaaataaataagctagaatttgtgcatagttttacttttctctcctttcttccataagaacttgaacatgtttctggatctatttccagaatagaaataggtgtagcagagtatgagtatcatgcaagcgtagatcattttgttctatatctccctggtcttagatctaaaactacctcttggttacatctacataattaataaactctactgagtacattcttattaatctttcttatctaaactgagctgacatctgacagcatgttagtcaaagacaaaagtaattcatttctttgcaatcctgctttagtaatatatgcagcattagtacataaagtagaaatgtctgtgttcctaatataaaaaagctagttgtggtcctatgccctgatgttattcttaatataccaagatacagtatgtgttgtgttttgtggtgtttgttttgttttggctacttggtattttgatttatgacaggcagttacgagaattgaattgttactcaaaaagtgtcttttgtagcagtttgaatttaagtggttttaaaagttaatagattctgtgattttcaaaatagtgtaggtgaatattctttgttaaaagagaaaccagcagcaagctacactacccaaacatagttctagaaatactgttatcttttgatacagttattctttaatttttaaaaaagaattctttggtcagatacactcaggaaacacttttaatgttatcagatttttattggtgatggtatcataatatttcccaaattttttactctcctaattttccttatgggggggtatagtacacaatattttccaatctcatgtaaccacagaactctcccttttttttcagggaactcttatcaatatcaacacaataatagtattattaacaattgtaggtacagtagacactatatgtctggcattattcaaaacattttacttgtatgaactcatttttgcctgcacaatgctatgagttaggtaattagttccattttacagaagtaaaactgagacacaaagaactttcccaaatcaccagctagaaagagacagacttgggatttagacaaggtctattgggctcttgagttggttttcttttttttaaagatggagtctcactctgttgcccaggctggagtgcagtggcatgatctcagctcactgcagcctccacctcctgggttcaagcaattctcctgcctcagccttccaagtagctgggattacaggtgcctaccaccatgcctggctaattttttgtatttttaatagagatggggtttcattgttttggctaggctggtcttgaacccttgacctcaagtgatctgcctgcctcggcctcccaaagtgctgagattacagacgtgagccactgtgccaggccttgggtttgttttctagccactctgttacactacctttttatggttgcctaggacaatggagttccacaaagcagtttgaactgctgatttagaggccttgaatggcttgtctgctggccatggaaataatagttacattttattgtgttatattctccacccttgaaactctacatgaattgtaaaaactgagaggtggactagaatcactctctcttacagtgtgtatgatatatcgcaggactttctgacaaagtgaaatagtagataagaaggattcttaatctggggtccttggactcctgagagtcttcagtggtcctcaggatctgggattgtttacaacaatttggccatgtgtatttttctagggaaagggctcataattttcattgtattatccaaggagcatatctttcaaaattgttaaaaattrttcatctgttgaacaattggagttatttttaaatctttgtagtctaggtaatggataattagaatgcttttaaaattattttcttcgctatatactactatgcttaagtgcactagtaattgtactatgagccctgtcattagcaaaactcactcttaagaaaaatgttccttggggaacattttagtttttagatggacataccatttttttatattaaaatcccagcattaaatacaagtttgttttgttttgttttgttttaccttgagatcacttcttaagtggcaaattttatcttattttaggacccaaccctggaagaaaagatggaatattttcagaatcaacttttaattctccacagggtgtagccataatgaataatatcatatatgtggcagacactgaaaaccaccttataagaaaggtaattttcattttaaatttgttttaatacttacaatcagaaaaaggaaatgtatttgctacattaaatatttgaagttaaagcgtgattcttatgtatgtcaatgtccttgttctgcttttcttgaggtacgtactttagttttattctcaagtatcctgtttctatttgtgtcagtatgtatttgtcacaaaagaaaaccccattcagttctttttttaacccttgtttcaaggctgtgtccctaatcactcaaaagctcctcattttgaagtatcttcctaaccactagtttacaatgatcctttgtcctttttcagttgaattttctcaaactagaaaaaaaatcctaccattcctgcttctattcaacttttatgctttggctggaaatactgattagccaattcgtcttaaaacttgtttgattttattatgtgtccttatttctaaaaagtcagctaatacataaaggtaaaaaaaagtcccctgaccatcaattccagtttcccagaggtaaccatccactgttaaagtgtgtgtctttttggaaattttctactcttataaaaataaattgatattaaaaagcctttttgtagagaattttttaaacaaatgtaatgatgctatgcatacataatgttttgcaggtttttctaactttttttttttgcatgttagtcacctgaatgatatgactgtatcacattccattgtagatgtactcggttatttcagacatttcctcctgatggttgttttggctaaaccattggtctttaagttgccatgtgtttggaaaataagtaaccaagttcatcatactcatcctgtctaaatacattgtttcagatactgccttgtttttctcactgtttctttcagtattgacatttattctcatttatttgacaatattttcacttatatacwcatagtagaaaaaaatacatataatatataataatatccactgtactgtaagtcttcctgagggctagaaatatgttttgtctactactgaatcctagcacctagaaaagacctggcctatggtaggtgttcaacagatatttgttggatgaatttatgagcaaataatactgtttcaggaagcacttttgaaagtgtgtattcctcaatataaaagtgttacatgaaaaacagattttgtgggttaatacattaaagcagatgtgttttttaaagtcttgcagactttcttccagacttaaatatgctaatgtattgttgagtgcattaatggggggatatctgtgcagcatttctaaacttatttgaccagagagccctttataggcagagctgcttataggactgtttccatggtgtatattttagggaaaagtggttttttaaattactaaattcttaatgattaatatttctttatcattatctttttggggttgtatgtgtctataattcgtcagaggggctagacctctaatggtgtattgaattagtaaaatagccagcctgcaacattcagggagtacttgtccttcttttttaattgtatgtcatttctcttgctttacaacttaatgggttttcgagtattgaccatgtgctccatttcaaatatttatgcatttaagtataatcacaacaaatttaggttacctgaaattgttttatattctgtgacttaatatggtgtctgcagaaatggaaagtggaattttttccttttaaaaatacaagaatatttattgtgttttatttttgtttaagacctcatttgcagaggattgaattgattatattctcattcatggctcacgaacattgtttcatgcagacccttctcatttagaataatttatttaaattataaattctcctacttccccatacccccaactctcactccccttacattagcatacctataagcagccattgtgatacgtttaatgcatgtttttatttgtatgtgatcttgtaagtgttctgtgtatattttttagttactttattgtgctatattttatgtatcataaagttaacccattgcaaatctataattcactagtttttagtaaatttaacaggttttgcaactgtaaccatacgttgtttttaaaacatttcatcccccaagtaagaacccacatgaccacttacagatagtccctgtcccctcccatccctaggcaactgttaatttactttctgtctctataaatttgccttttccaaacattttattaaatagaattatatatattttcttgtatttggcttctttcatttcacataatgaaaagttcatgtgtgaagtagcatttcagtagttcattcctttgtattgctggatagtattctgttgtgtgaatatatgacattttatctaccaattcaccattgatatttagattgtgttttggctattttgtatattttgttattttgggctgttatgaataatcttgctgtgagcattgatacacaggttttacatggacatacatttttatttggcatgggtagatacctagaattggtattgtagagttatatgttttatgtttaattttttgagagctgctgaattattttccatagcaattgcaccatcttaccttcccactcgaaatatatgtgggttccaattttctacatgttcaccgtcacttgttatttttcattttttaaaaattctagccatcctactggatatgaagtggcatctcaytgtggttttgatatgcatttcccttatgactaatgatgtcaaccaccttttcctgtgcttatgggccatttttatatctttgagaagtgtcagtattctttgccaaatttttaattgggttgtcttttctataatacagttgtaagaatcctttgtatattctaggtacaagttctttatcagatatatgatttacaaatgatttttcacatttttctgcttgcctttatacttagttaatcatgttctttgatacattgaagttttaaattttgatgatgactgatttgtccattttttccttttgttgcttatgtttttgttgttgtaagaatccattgctaaatccaaggtcataattatttacccctgtgttttattctaaaagtcttttagttatggctcttataattaggtctttgatccattttgagtcgatttttgtatatggtgtgaagtaggggttcaacttcattcttttacatgtggatatacagttaccccagaaacatttgtccaaaagactgttctttctcccttgaatagctgtagcagccttgttaaaaattagttgatcatagatgtatggacccattgatctctctgtctgtctttatgccagtaccttactgttttgattgctgtagcttttaataatgtttgaaattgggaagtataagtcctcccactttcttctttttcaagattattttggctatcctaggtcccttgcaatttgataagaattttaggaccagcttgtccatttctgccaaaatcttttgattgtttcttatgtaaacatattgtctccaaaaacaaattcccttttgatttttaaacttcctgtttccttttattatattgctggctagtacctctcttgcttttaagcattagcaatgatggtgggtatcttgtcatgcttataatcttaaagggaatacatgtacattttctccagaagtttaatatttgctgtagctttgaggaataagatatctatgaagtaaggaaaatttctgtctattgatagctggataaaatgtgcaataaagcaattaagtgaaatattgaatatcatctcagtggtaggtatatggatgtttgttacaaaaattttttaactttcctgtgtgtttgaaaattttcccaatacattgttggggagagggtctcaggagatgaaagcagaacatattttcccagtagaatacattagtttttcagtttataaagtaaagtccgtaaagtgtcatggaactgcctgggttcaggtcccagattcttgacttactaactgtgggacattgaaaaagttacttaatgatctgtgttttagttttctctaaaatattaaaatcgtcacacagttatgagcatggctggatggctggttggcttgctcactattggattagtgcttggcacatgtaagttttaatgtgtgtcaattactagctgagcacaactgaaatatgtgcatttaatttttagaaacatgtattttgctacattgtgttttaaaatttcattttaaaatttttgtttagttaagatgaggtcaatgccagatctgctggaggcatgatgggagatggggataagaggggaaaagtagaggaatggacaggtgggatatgaaagggamtgattatgtgcatttgaataagaagttcattctataattgattggccttttttcawaataaaactttgtactgcacatacactctaaatgttctattgactattgaaaatctttacacagcaaaagacaaaagcaaaagtaacattcattgcataaaaccatcctttgaatttctatagattgacctagaagctgagaaggtgagcactrtagctggtattggaattcaaggtacagataaagaaggtggagcaaaaggagaacaacaacccattagttccccttgggatgtagtttttggaacatcaggtatgtgaacttttgatattaaatgtaaaggtaaattttacttcatgtaagatttaaaaatattcttgaggtggtcatttggattccattactagttattttattttatacttttatacctatgcctcagagtttgttaattgtgtaaaaacaaagctagcagtaatatagatatatatatactagagtatgtattatatatattacatattttatctataagatagactatgtgttactctaaagaattatatattagatgcaccctccaattaatgtagttctgaatttcttatactgaaaggattatagtatcagaacttcaaaaggttattcatgaacagtaatcagtaataataaaaataaatttattcataaataaggaacttatagtgtcattatatactctagtttgaaaaagaaatcaaagaggcagctgcttttgctttagatttaaaaaatttatattaaagtatgataacttctttaaacttttaccctagtgaattgtgtagacattgataatgaatgaaacttaatgttatctttattatctatattaattgactaaaagaagtccaggagtactcttattagtatttttattttttattggctctcagtgatactgagatggtcatctacatgtctaaaattggattgatgagtaaacaaagttagaatatgtcgaaaatgtaattttggactaaatggttggtgttgtcttcatatatttaaagagtatataagtaccagcttagttgaaaagctttacatttgaggtaactttcttttatgatgccaatttaattatgattcaaacaccctactttttggttgttattaacttttatgaagcacttaatactcataaaataaatgagtgaacttctagtactacccgcacttaacacttaagtattttgtgtaggttatttttgagaattctacttatggaattgtatgttgtaaacataatttgtttcatagctcaccgaaggggatagtatagtaggagcagtgcatccaactaaagggatacttcatatgtagagaattttgaaatattaatacagtgaactaaaattcagtctccattttattaccatgcattagcaattctaaataatttcagggctaaatcttcaccagtacttttcacttttacctccctgccttatttgctctacttttgattatttttgctaaatcgtattttagtatgatgttatttattacatgagttgttctatagtgcaagtaaacaaactacagctacatctagcagcatggacaaatatagcaagggatattttgagtgataaaagaaagttacagaatatgtacaatataatttctttgtatgtagaaatctacaatatgatttcttttatagcaagtacaatagcatttaatacaagcattgggagatccattcagacataataaagttaaaaagtaagaagaatgataaatgtacatttttatactagtggttccttatgggaagaggagcaattaggtaagaaaaagaaataaaaggcatccatatgggaaaagaaaagtgaaattgtctctatttgctgatgacatgattttatatgtagaaaatccttatgactctaccaaaagactattagagctgataaattttgtaaagttgaagattacaaaatcaacatacaaaaattaatagtgtttctatatactaacagtgaactatccaaaaaggaaattatggaaacaatttcattgacagcagcatttaaaaaagtaaatatttaagagtaaatttaaccaaggaggtggaaagatctgtacacagaaaactataaaacattgatgaaataatttgaagaagacaaataaatggagagatattccatgttcatggatgggaagaattaatattgttaaaatgttcatactacccaaaccattatacagattcagtgtaatttctatcaaaactgtgttgtgatttttcttagaaatagaaaaaaactatcttaaaatgtgtatggaactagaaaagatcctgaatagccaaaacagtcttgagcagaaagaacaaagctggaagcatcacacttcctgatttcaagctatgaagctattgtaatcaaaatggcatggtactgttataaaaacacacgtatcaaccaatataacaggatagaaaacccagaaataaacccaagtatttacagtcaaatgattttcaacaaaagtgccaagaacacacaatgaggaaaggacaattcgttccataaatggtgttgggaaaactggatatccacatgcagatgaatgaaattggactatatcatatacaaaaaccaactcaaaatagattaaagactcacaaggcctgaaatggtaaagctacaagaagaaaacaggaaaagctccacagcattgatctgggcaatgaatgatttcttggataggactccaaaaacacaggcaacgaaagcaaaaatagaccagtgggattgcatcaaactaaaaagctctatacagcaaagaaaacagttaacagaatgaagagacaacctatgggttgggagaaaatatctgcaaaccatataaccaataaggggctaatatccaaaatatgtaaggaactcaactcaatatcaagaaaacaacctaactaaaatatagggaaagggtatcacaaacatttctcaaaagagatatgaatggtaagcagatatatgagaaaatattcatcatctctaatcatcaaggaaatgagaattaaagcaatgatgtgatattacctcacacctgttagaatgactttatcaaaaagacaaatgataaatgttgatgaggatgcggaaaaaagagaacctttgtacactgttgggattgtaaattaatacagacattttggaaaatagtatggaggtggctgaaaaaactaaaaatagaatatttatatgatccatcagtctgacttaacaaaggcatttaaattgctgtgtcatagagatatttgcactcccatatttatttcagcagtattcacaattgctaagatatggaggcaacccaagtgtccatcagtggatgaatggttaaagaaaatgtatatctaaggctgggcatggtggctcatgcctgtaatcccagcactttgggaggctgaggcggccagatcacctgaggtcaggagttcaagaccagcctcgccaacgtggtgaagccccgtctatacaagaatacaaaaattagctgggcgtgatagtagatgcctgtaaaaatcctagctacttgggaggctgaggtgggagaatcacttgaacccgggaggcggaggttgcagtgagccaagatcatgccactgcactgcagcctgggcaacagagcaagactctgtctctaaaaaaacaaaaagaaaatgtatatctatacactggaatactatacagctttaaatactgtcattcatgacaacatggatggaagcagaggacattatgctaagtgaaataagccaaacacagacagacagatactgtatgatcttacttgtggaatctaaaaatgtcaatcttaggccgggcatgatggctcatgcctataatcccagcactttgggaggctaaggtgagaggatttcttaaggccaggagtttgagaccagtctggtcaacatagcaagacactatttctacaaaagaaattttaaaataaaaagtaaatttaaaaaaattgtaagaaaatctcagaaaaagaacgtaggaaggtggttgctagaggctaggaataagggaaggtatggggaaagggaagaggttgatcaaagggtacaaagtttcaattggaggaataagttttagagataattgtgcactgcatggtgactgacttgtagttattaatgtgtatttcacagctgctaaaagaataaatatttaacatttgcaccacacagaaaaaaatgttggtatattcatagatatattatttagcttgattgaatctttctacagtatacacatagatcaaaacatgacattgtaccccacgaatgtacacaattattattggtcaattaaaaatttgaaaaagatgtaggaaagggactagaaatatctcattattttaaatctacatgtagtatgtaaatgcatgtgtttatgtattttaaatggtatctgaatatttaacctgactatgccgtatagttataaaaataattaatataaagtgacttttacaaaattacattttatctgtgttcattttttaattgtcattcttaatgtggtcagaacatcatgcaccaaaaataattactacagtaagttcattttttcagcagatacattgtaatgtttctaaaatgtgtatcaggtctgtgttgactccatttgtaccagacaacaacctgaaagacgtttagcataaaggttgaaactcctatcagtatctttttttttttttttttttgagactgaggctcgccatatcacctaggctggagtgcagtgacgtgatctcggctcactgcaacctctgcctgtcgggttcaagcaattctcctgcctcagcctcccaagtagctgagattacaggtgtgcaccaccatgcctggctaatttttgtatttttagtagagatggggtttcaccatgttggccaggctgttctctaactcctgacctctagtgatttgcccgccttggcctcccaaagtgctgggattacaggtatgagccactgcgcccagccaaaacccctatcagtatctaagtactttaagactttacctgattttgagtcatttatagaaaggataacgtgccagaatcccattaacctttcttggccctttaatcaacattttccctagatagaagtttagccattcttctacaacctttaatggttgaaatccaactatttagtatgctagtctgataatctacagtgttcgtatttatgtgcttcaataaatgcttctctgactcgcattattaatatgatataaaataccatgaaaatatttttgctttaaaaaaatcagatgacacggagttttgaaggaataaatttgatgcagtatgactagtacatttttattttgttaaaataagttatatctttatgtctaaaatttgagagaagattcttatactgccttatcacattgacttggtgttgattttttttaggttaattaggtataatttatatacagtaaaatttacccttattaggtatataattctatgaaatttgacaaagaagtgcagtcttgtaacttttaccacagtcaagatacagaatattttcatcccaaaaagttatttcatagcctgttgttgagtctccccccgccatcaccacactcactgcagcaactggcagcagtgatctctttcctgttctctgtcatctttcatgtctggcttcttccatttagcataatgtttttgagattcatccctgtggttccatgtatcagtaatttgttctcttttatcactgagtagtagttcgttgtatggctctaccacagtttgtttattcattcaccagttaatagacatttgaaggtatttctagttttcagtggctatagaaaacctccataaacgtttgtgcacagtttttgttttgtggtaatatgcattcacttctcttgggcaaatgcctaagaatgagattactgggtcatatggtaagtgaatgtgtacaagaaactgccagactgttttccacagtggctgttttcttaaagtcccaaatgtctgttgggagtcattgcttctgcctgaagaacttcttatgacacaggtctgctggcagtgatttttcttgcctttattctggtctgaaaaagtatctagctttcatttttgaaagttatttttattgcgtatgtgaatctggattaacatttttttcttttactattttaaagatattactccattgtcttttgacttacatagttttccacaagacacstgttttaatattatctcttgttctttatatgtaaagtgtatttttttctctggttgctttcaagattttatctttggttttcagcagtttgatatatctaagaattatcctgcttggagttcttgaatctgtggtttgatgttcattattttcaagaaattctcactcattatctcttcagatatttttttctgcccctttctgtctttctctttctgggacttcagttactcatgttagatttcttcttaatattatattcaataactcttgcatattgtgttctttttattcattcttcttattttttctttttgtactagtaatttctaccaatttatcttcagtcattaattctttcttcagctgtgtctagtcaactgatgagcctgttgtattagtccattctcatactgctataaagatactacctgagactaggtagtttataaagaaaggaggtttaattaactcacagttccacatggctggggaggcctcaggaaacttgaaatcacagcagaagatgaggaggaaacaaggcacatcttacttagcaggcagccaagagagagtaccaagggggaagtgccagacagttactaagcaaccagatctcgtaagaactcattcactatcatgagaacagcaagagggaaactacccccatgatccaatcactttccaccaggtccctccctcgacttgtggggattacaattcagattacaattcgagatgagatttgggtgggaacacggccaaaccatatcatttgtagaaggaatttttcatctctaatattatgcctttttaatatagcatttgtatttcttacagattcatctctgctgaaattccttatctatttaggtgtgttgaccacctttttctctaggttctttaacatactatgcatagttatttcaaagtctgtattagatagttccaaatctggggactgtcctcgagtctgtttctgatcattcctttgttactcggaagcgggtaatgtttttgcttttatgtgtgtcttctcattatttattatatgtcagtcatcttgtataaaacaatagaggctgagataaatagtacttatgttataattatgaaagattgagtmaatttggtcaggagctgagctgggccttggttttattattgctatgtcaatgcaccacatgttttaaattcctctagctgggcagttgttgccttctgattttgcctcagtacatgggcctagattagctggagggttttcttagtgttagtgctctaccctcagctttcagtcgtccctgtacaatgaagccacatggtggttccctctctccactcttgcagccgtcccagggatagactgctactcgttgttattctgccccaggcttgtgttgtgtatggggatgttctctgttgttcagcctcagccttgggaaggccctgagtgcctaggccttgaggaaaggatgtggggagctttttcattgttgctgttcctctctctggcagccagaatctgtcttgtgtctgtgattggtttggggagcctcctgtttctcccctagcagaatgagaactctgcttggtgtcagtagagcattttttcatctaccttttccacagctgtaaatggtattttcctgtgctctgtggaaagtgacaggctttgctgcccttccctagtggcttaagactttgattcataagaggtttagagactttgtagaaacaaatctgtgtagaagcactgatggagaatttcacggatgctcttaggagggttctagtcataggtacttaaaatgacagaatttttttaaagctggatttcaggtaattttcatgttgatatttcttttgttgattttatttgttttctaaaaatatgtctaatctctactgataattatgagtgagttttgcctttaaaaatattttcagaaccttttcagcctctgtcattgtcgttttaaaaaatttttaatttgtgattgttgaaagtcagtaatattaagtgcactcttttttgtaattttaccttctatttgagattgggaggtatgtatgaggtttgttgtgtaggtgtaagtatactcttaatttaaaatggaaatgttcatgattaccacattctttttagagggaacaaatctaatacccatactcagtgatggaactgtgtgctttggaggccacactccaggatgaacagttgtaaattgttaatatgactcttgttactttgatagacattataaatgccagccctctttttttttttttaactttcattttgtttacaaaaacaaactcttcagtgctcagggtaaaaatttctggagaagtggtctagcacggtggctgtgagcaaggactctggagccagaccagctaggtttgcagctccacatcttagtagttgtgtgactttggacaagtttcatagcctctttatacctcaacttccccatctaaattgatgatacaaatagtgcctacctgaaaggcttaccatgaggataagaattaatatatgtaaagcacttagaacagtgtctggtgcatagaaagcataatataatatacatgtttgctattatcactgttttctataagataagaattttgtcataaagtgtcatgaacagatgctgatgatctgaaccaaaccaaaaatgggaaggcaagggactagaaaataactttaaagacattatccaaccatagaccattcccaggggtacagggagagaaaggcagaggggtaaacctcactatgcatcccggagtaggaggctgtgggtacatttaatcagatccctgtttctgatcacagacagaaatgcacttgagtacttgttaccagagctaagtctgcatgggtcagaggcagaaggagggtgaaaaacgggcaagcagagaactgaaccaaatagttccttcattctcatcagaacactcataatctagagtcagattcactaatgaagtcgttttccaagtttagctgggtgaatttcagcaaattatttagcctctttgaagctggctttttataaaatgaagatgatgataataagacttgttaaggttgttaaattgaaggaaataatccacgtaaaattattagctcggtgccatcaacacagaaagtgacctgggtgatgattatcattatcctcataagttggtatgtagaattccaaacacctgaaccctgacctgacactgctgctgcttctctactttttctctttcctcgggcatctgaaggaaataagtacacagagaccaaaactaaaccaatgcccatactttatctatcactgggaagcttttgccttattatagtaagccccagctgagctagaccgacctgtttggagaactagataacaaagttaaatttgatctttcactcagctatgcaccaacatagctctcctttgccaagacagaggctytaaaagcaagctaagaaaagcaaatgtttttgttcctaaagcttagagctaaatttgcctaactcacccttatgagattttcttagagtgggacattgatgtgaaagagaaagaaaaatgcagttttcaaggtgggaacaggatgacaaaccagttcagaaggaattcttgcagtaatccctgatagtggcttaggtcaaggtggaggtggtgagaagtggtcagattttgaatatattttgaataaggagcctacataatttgctgatggatcatgtgtgacatgtgagaaaaaggaggaattaaagatgactccaaggcttatgacctgagaagctaaaaggatggagtccttttattttcatttacttggtcaaccttccagtcttgttacccataaggtcctaacattggctggagctgacttttcaatcaagataagttgtataaaaatatctgtctatatttctctcaataatgattcttagtgtagaaggcttataaatcttttttacccttaggtgtttgatgtttttgaatgtcgttataaattttcttgtatatttgctgctgtaaaccgataaaagaatttatccttgcttattgaccctgtacccaacaacattgctaaattcctgtataaaattgtgaagattttgtgtgcatagttatgtcatctgctaataactacagttttatttctaatctttttgtgctttgcttctttttccttctttgttgcacaaactaggacctccataaggtgttaaatagaagtgttgatagtaggtatctttgtctcatttttattctcggggatgtttgtaggattttgttcttaagtaggatgtttgctgtgactttcttaaaaatgttctttataagattaaataaattgccttctgatcctagtttgctgagtttttatcatgaatggaagcttgttggagatgttgaaaggctttattgttatgtgtggctttggagttctcagccctatcagatcccagatccccttcctataatacattttatgaaaagcctcctttaccatacctaaagtgaaattcataggtagtataatccacctgtgctatatattgatatatacataatataaatatagagaagaaataagcataatttataataaaatagtgtagtcattatgtaagtgatctggcatgactatattatcatatgatatattacccatcaaatatccacagcattttttagggtgggctgccactcccattcagcatcattgtttgagaggataatagtacaggttcacatctatagcagacttctgggattagagatgaatcattagtactattaggaaataccaaccatcattaggatagctttagggctttttttctttttttgtggtttctaggggaaagtttactcattcaacaaatacctactgagcatttggcatgtgccaggcactattctatgtgctgctaataaaactgtgaataaaacaaagctgctggcctcttagaccttatgctcagtagaggagaaaggcagtaaattaataaatatgtaacatgtaagatagtgataaattctacagtgaaaaataggcaaggtaaggagctaagaatgatgggtgtgtggtattagataaggggagtagggaagaagcttgagcagagatctgaatgttcatatctggatgtaagctttctaggatgagaaaggagggagcacactaaggtatagaagttgaaagacagcaaattatttagcacctaacatgatgcctggcaccatgttaggtgctttgcttacactgttttattccttccagtaatcttatgtagagagtgatgatgtgctcattttacagatgaggaaatggaggcacacacattagaaagtgatgtagctactacaattcaaatccagacccacctggttccaaagctaaggaattggtgaaggaatgctttcaggagccctcttcttttagtggtctatcacattaccataggagtaattacatttcattgagaaaaatgggagaactgggtagaggacttgaaaacataatcatttacattttttcatgtagcattttaaaaatatttgaacctccacaatgagataccatctcacaccagttagaatggcgatcattaaaaagtcaggaaacagcaggtgctggagaggatgtggagaaataggaacacttttacactgttggtgggactgtaaactagttcaaccattgtggaagtcagtgtggcgattcctcagggatctagaactagaaataccatttgacccagcaatcctattactgggtatatacccaaaggactataaatcatgctactataaagacacatgcacgtgtatgtttattgcggcattattcacaatagcaaagacttggaaccaactcaaatgtccaacaatgatagactggattaagaaaatgtggcacatatacaccatggaatactatgcagccataaaaaaggatgagttcatgtcctttgtagggacatggatgaaattggaaatcatcattctcagtaaactatggcaagaacaaaaaaccaaacaccgcatattctcactcataggtgggaattgaacaatgagaacacatggacacaggaaggggaacataacactctggggactgttgtggggtggggggaggggggagggatagcattgggagatataccaaatgctagatgatgagttagtgggtgcagcgcaccagcatggcacatgtatacaaatgtaactaacctgcacgttgtgcacatgtaccctaaaacttaaagtgtaataataataaataaataaataaaagaaaaaaaagtatttgaactggctgggcatggtggctcatgagcgcctgtaatcctagcactttgggaggctgaggtgggcagatcacgaggttaggagatcgagaccatcctgrctaacacagtgaaaccccgtctctactaaaaatacaaaaaattagccgggcatggtggcgggtgcctgtagtcccagctactcgggaggctgaggcaggagaatggcatgaacctgggaggcggagcttgcagtgagccgagattgctccactgcactccagcctgggggacggagtgagactccgcctcaaaaaaaaaaaaaaaaattttgaaccaataaatgctttgaaatattgtgaatggaaaacattccaaattaagttagaatgaataagattattcattttcgtgggctttccatgtttttatttctcttacctactgaagtttttgttttgcttggtcatttccatagttgataatatcattgactatgcaggaacataaaagtcattttcattgtttaatactaaaagtttattatcttagatttatggtagatttaacagaaataagcaattctaaactgagtgctttcttaggtaccaaatatgatctgttggtaatacatgcattattaatactcactgtaaaattaatgaacttcttaagtggaagaggttgtattatactttttaccctctatsgtgtctattgaagggctgttcagtttgtaaatgtatttatgttttcctagtacaaatatgtaaaattaaggtccagattcactaaatgatcatggctaacatttgagtgatattgcctccaagcattactctaagtgcatcgtgtgctttgagccttttatttggatgccagtatatgtaacataacagaatattttatgagcttaggtttcctgttcattttcgtagtcccgggttgtggctctagaataactgaaacattgtggtatgctaaaaattaattgtggaaagcttttgatgtagttttaaggtgattaagcagagacagtccccagaatatatgtgtgccagtgtcacttttaatagtttatgtcatgtaaaataagaaatcagatgtttaaaacattgttaatgctcgttgtaaaattaacaaactgctgaggcagagttcagatgcagagatgcagaggacttactgctggtaagaatactttggattcctgtgaaattgttgtgggtaaaattacaagtctaacaaagtaaacctttcacaagaaaacaaaattttcaaagataacttgaaacattgcagatatttttatttatcagatgattcacaaacatattgttatcctccataaatttaacattttaaaaccattggagtgtttgtattaaccagatatgtatataataataatgatttatttttataaaggttcagaggtccaaagaggtgacattttatggatagccatggcagggactcatcagatatgggcactcctgctggactctggcaaactgccaaagaaaaagtaagtgacagcctctctctttgagtagactgtactacttggtgttcatataatttcttttttcaaaatcaccatcctcactgtaccagtcaggatgtgctaggttgtactgccatagcacacaacgcagattctcagtgacttaaaacaaggcgtgtttattgctcactcacatgggttcactggggagcactcctctgttgcccaggctgatgaaacagcctggagctttcgggagcttcgccagtcatcctggcacagtgagagagaaagaggtagtaagtcactcactgactgttaaaatttctactcagaagtgacacacgtcacttctacttacattttatcagccagagtaagtcttagggccacacttcacttcatggaacctgcaaagaatcattctccttactgtctagaaagagaactaagaatattcagtggacccttatcttttaagacatagttgaactatctctaatcattcattcaaacagttgaataccacatagcagagtgcttaataactcagtttttgtagtcaggcctgaggttgaatcctggctctgccatttactatctgtgtgagtttaggagagccactttaactttcaaagcctcagtttccttatttatattacctcataggcttgctttgagaattaataatatatgtggagagcttggcatagtacctaacatgtacagtaaacataggtagctttgctgtcacaaggatataaggatgaaagggtagtgtctgcaaagtttctcatattttttttccttagaccctttcctcttcccccaataccccaggcagaactggccatactcttctctgtgacctcactgtacctggtgtatagttacatcactgcactaagttttcctgccccaacccgctgccccttcctctttctctctcttctctccttttgattgtttttatttttagccatttcctcctactagtctcttaaaggaaaggatcctctcccattcatttttctgtcccttgtacctagcacagtatttggtacctaagaggagctcagtaacggtttgaggataaatgaataaaagccgttaaccggaaaggctgtcacgtagccatggaaaatgatcattgcaagttaccgttattaatagaaagctgcttttatatagatccttcaaaatagcagatattccaaatagtgtgtatgtttgtgcatgttgctttggacacacttatgtaatgttttaagacatttaatcgtttagcaaatatttatgctaggcaatagggatgaaatatgctcactatgttaaggatacaatgaaaagatgtggttgtcatcagtgaacttacagaggaagaatcagatcagcaaacaattaaaagttagtgtgtgcaaaaggaatcgctgcaaattgaaattgttcggctgggtgcggtgggtcacgcctgtaatcccagcactttggggggccgaggcaggcagatcacaaggtcagtagttcgagaccagaatgacaatatggtgaaaccccgtctctactaaaaatagaaaaagttagctgggcgtggtggcgcttgcctgtaatcccagctactcaggaggctgtggcaggagaatcgcttgaacccaggaggcggaaggttgcagtgagctgagattgtgccactgcactccagccaggacgacagagtgagactccgtttaaaaaaaaaaaaattgaaattgttccttatataagtaagaggaagacgcaacatcagtaagatttgagttgtcaaggagggcttcttggaagaggcaactaaacagtgacctgataagagtagtaggagttagggagagtggaaagttttccaggcaagaattggcactagtgatgtcagtagaagccagatcacactgtgccttgtgagtacttttagggatctgaatattctacaagcctttttagaaaggtttaagctgggaagtgacatgattagatttgtgtttttgaaagaacattggcagcactcagagtggaacaagactagagacagagataagagataccactgaggagcctattgctgttatccaggcaagagatgatagtagcctgaacagtgagattaccaataagattttacatgaggcataattataaacagcagagaagtaacagaagttgccagaatatgctgttctgggtgatggctgttttaggcatagatgattcagagctgcctgaatttcctcataagtagagttgtcactctccttcttaataggaaattggcactaggaccacactgacctgtgttttaattttaaggatgtattatytttattaccgatcttcaggtagtaatgacccttagcattttaaaagttattgtttctccctactcttttctttatttaattaaggaaactcctttttaaagtattaagactccttgtagactcctttcaattaatttgttcagcatattagttattacatatattgtacttgctatgtttatatgtttcttgaataagtggccatattttatgcgtgctaaatccctttgcctctgtcccctgctccctacctaacttattatgggaacatattagccagtaagtgatggtgagttcagacttttgcatgttgtaccatattcagaaatgatttacacagactctcattttgtgtcccgagtcagctgcttcccttccctcaacacaacacactaccatgtcttttttacagtctctctggaataaacttagaaaccaggatctaaagctttctctgcattacaaaaggaatcattgcaatagttccttaaatagaaatttccctaatgtatataagaaattgatttgtacaatcgatataattgtacataattatcccatgtaattttaagataattatgtacaattatattatttttcatataatagtaatgtctgacctggccaactttcaaaaactattctttaattccttttgctggtctctgtttatatataagaacacaaaacatttttaatgaaaattgaagctttaaactatcaagagctagatgatctttttagttccctttccgaacctcatattgcatgaaactaagaagttaagaatttaaggtagtaaaaacaacctatctcatcaataatctgatcattatttttatcttataattctatcagggatttgtcrtttaacatttgaaagtgatttcagttttgtgtgtatcaaagtaaagtaagaagttccctacacagtgggtaaataagttaatggttggaaaaatgataatgaaagctgacttgaacaatttaactagaccaagatcactagtttgtttttttaggaggcttatcactwttgatttgattattcacattcatttatttaagaactaaattgcacacaatataccacatgttgactccacctatgaacttgtctttttcagtgagttaacaaaaggaacctgccttaggtttgctggaagtggaaatgaagagaatcgaaacaatgcctatcctcacaaggcaggttttgcccaaccttcaggcctttccttggcctctgaagatccctggagctgcttgtttgtagcagatagtgagagcagtacagtgagaaccgtttcactgaaagatggagcagtgaagcacctcgtaggaggagaaagagaccccatggtaatgacagtcactcttgcacagtgcgctyggacactgagcaagctgtcaattttgtgaattatggaaagttaataagatttaagagagaccatccttggcctatctgcgaatcaaaatgaaagtcagaccaaaggaaatgtgaatgtaaagcaacgtgaggaacacaccatctaagaaaagtgaactgactctactttattatgtataaatgttaaggtttcagggagaaagaaaggatgaagcattgattattggagaaaagaaaaaaatgtaaattagatattgggcagtggggtggaaagagcaccagactagtggacttgacctattcctgaccagatgtagtattgtgagtaaaactactaagcaccaccaattaatacaggttcaaaatactgtcattttttttctaatctgaatgaagtatccaaccctatttatatgaaaatcagcattttcccttttaacttaaataccatttgtaactgtttgaattttccttcatattctaacaaaacactgtaaaaattataataactgctgtttcttttcttttaaaaaaaattaaagaatttatttgcttttggtgatgttgatggagtaggaatcaatgcaaagcttcaacacccccttggagtaacatgggacaaaaaaaggaatttactttatgttgcagactcctacaatcacaaggtgagtcgtgacagaattatataatatcttgctttttgtgtgtggcatttaaaatgctgaaagatctgtgagcctcctacaactgccactctaaaatatagaaaggagtaacagtctttgacaactataacccagcctgttctgctcttttcttggtcctttctttgccaagaggttatgatggtattctgaactagggaaagcacagaaccagttccaatggcaatagccaacagttgtgaattgcaacccatcaaagctgcttagtaacatattcagtatatcaagagaaggcaagtagcagggaaatttatatgtcatctaacaaatgaacgtttttgagctgttgcatagttacagtgcttgttagtaaataattttgttttcagcatttccatttttgtctattaaattgtcttaagttttattgcatttttactttttacaaaaatcagtggataataaatgttcatgcagtacttcatgatgtgagaccataaatttaatataattgagacataactgtcaatcattaagtttaacaaaggtagcaaattctcaggcaatgctagatgctcaggaagacaaagtcagttcagttgtgaaagtgtgtcccattgtgaagaaaaacaattcaataaaaaaaaattttttttaattccagaaataacttcatcaaagattgcttccagaagacaagatggagctaaggattttacatagtctttagttcttagaatagaatatctccccttagactgcaatttgaatgtttggcttttcaagaaaatatggaaataactattccttttgtgagacttattgagaatattaatggcaatcagaaattagcttgcttgataccatactcttccatacaacaaacatgagattgatcttcagttatataagtttttgttctttcttttttagattaaagttgtggatccaaaaacaaaaaactgtacaacattagcaggaactggagacacaaataatgttaccagttccagttttacagagtcaacttttaatgaaccaggaggcttgtgtattggagagaatggagaattattatatgtagcagacaccaataatcatcaaattaaagtgatggatttagaaactaaaatggtatctgtggtaagtaattttaaaatataagttaaagaatgtggttttaagaatgatactaagatcctcacagcactgacagaggcatttttggttagaccatctccaggagagtattaagtggatgcttctgttgtattctttgacaaagagaccagcaggactgctttaaggatatccttttattcttaaaataaaagttccatctgtgctgagagtttgagaaaaatactggaaattggagataatctaatgaaccttcaagaaaaaaaaaaggagaggactcagatctgtttttaagtgtacagacatactgacatacactacatacacctgctctgtgggttgggttatttagcttattgtttttgtttttttttttttttcagtgatctttagattaacatgtaacctttgtttgcctgtgatgaatccattaccaaataatctaacaaaagctttaraagccactttctcaagacatcgaaaataagattgtggaagaaacttaaatgagttatagtcagtttttaaagatatggacgtggtttcttatagaattttcaaggggaaatgtctattataaactaactcttgatgtatgacatttacctgaaaaaaatgcaacagtttttttctgaaaaactggtaatttgcacggtatatttttaaaakaaacatagattactattgcaacataaatgtcatttctcttcacgtagatctctgatataagatgaataacatcttcttatagttgacaatgaaaattataagaaaatgtatatctagcatgtttaaatttataaacttttgctttaatttcctgccgtctatatacattggacagttactttaattctgcctcattcataagtgttgggttttgttgttgtcgctaagataaactttctctgtgtctacgaaaataatcttgagggcatctaacacattctaattcaaactagaatggcgattagtttcattgacatagaacttcattattctactaaagtctaaaaatatgctctcattctataattaatatwaagttcttgtgttttaataacagattttcttatttcctagctccccatcttcagatctgaaaatgctgtggtagatggcccgttcctagtagaaaaacagaagacattacccaaactacctaaatctgctccaagcattaggctttcccccgtgactgcgtgtgctggccagactcttcagttcaaactcagattagacctcccatcaggatcaaagctaactgaaggagtatccagttgctggtttctaacagctgaaggtatgagtataagcttgcaaatactaatacatcatatattcttgatgtttaatctagttattttttatttgttaggtgatatttttactctgtataggcaagatttgaagatcatatgaacaaatgaatccagatccaaccccacattggccatttgctttactcatcaagagtctttcttcccttttattaaagaacagtgtaactcaccaaaagttacaagtcagttgttagcatgatttcttggaatgtgggttttcctatacctcatcccttattctgatcctgttcttcattctattcttgttccaaaaagaatcttagagttaaaaagtctgaaatagagaaagtggagccctcgtatttaacatctttttctgtgactcttcctttcagtcactcttgggcattcctccctttcttctatttgtgaatcacagtatgagctagctccttatttcattaatctatggtaaggaatcagtatactgcttgccttgcagtatgcattccaacatctgtaacctggtggacaaaaattttaaagtgaaattttagtggttcagaacttctaaattacaacttgtctctaatgatattcctctgtcctggtctcccacgctctttcacactttctcactcaattttccatttccttcccaactcctcctccttcataccctctcacacacttttcttttgtacattacccaaatcctgggtaattcattccttcttaccttcaactttctcagggcagcagccactggcctgcaattataatatcaacttagtgtctaaaccaagaggataacggtatcttggtagactggctgggaggaactgctggttagtgtttgggaggctggttctagggtgattgagtctgtagggaaaccaccccttgtcacttcccacaagggggaaggctaaccatgtactaggacctttggagcttgctttgtagacagaagaatactcaaaccctggccactccatagccttttgtaggttcagagcaagttctagactgccaatttaagtctggaagtattacatcagttggagaacattaatttttctcagtgtaactgtaagagcagtcactgttagagcagtgtattaaatggtgtcactgtaggagcagtgtactaatttttaaaataggatattgacagattaacattggtctgcattgtcagacacactaattaatattgagtcattgggatataaaatacagatagtattcaaataaagtagtctatagagactttatctaatttgtccaagatatgggccccatttttattatatagtagcagataattttcaggcaataatcctaataatttaaggtttttgaatattatagagtacatttgtacacttatgtttaaaggacattttctcttttggcttgttatttagaaacacttatttttagccaaattttggtctgtataatcttaaagaagttagaatatatgcaagttttaagccaaaaaaaaaaaggcagcataaaagcaccacatgtgttgtaacttcacaaattgtgtgtgtgatatatatgacaaatatctaaagaaacattttctgttttatttctagatttggacattaaaatagctcagtattattttctttgtttgatttaaaatataagaaattggccaggcgtggtggctcacgcctgtaatcccagcactttgggagacagaggcaggcagatcatgaggtcaggagatcgagaccatcctggctaacacggtgaaacccatctctactaaaaatacaaaaaattagccgagtgtggtagtggggtagtcccagctactcaggaggctgaggcaggagaatggcgtgaacccgggagggaggcagagctcgcagtgagccaagctcacgccactgcactctagcctgggtgacagagcgagactccgtctcaaaaaataataaataaaatataagaagttctctactaatctctctagcaaaatcatgcattagataaaagatactctctaacccaggaataaacaaagaaagccaaagagttttaaagagaatttaaaaagaattctttaaaagcttcagcatagaagttttgtacttatctctctagattcttatctttcaccttcgtactcttatttgacatatttttctcaaatttgatttttcagtaaactaaagcaataaactaaaagagacatcaagaggactgataaaggcaggcactctgagtcggtttacttaccctgagaacaaaagaaagagacagaaaagctaaaaagtagacagcatttcatcacactcagtaggtggtccagtttttgtacagatgagtcattagaaaatgttcagtgttctccatttacatggtgggaaagcatttcatatatttcccaaatgctggctcttgagggctgccacctttttaggctgaatgtctgtatgtgtctgtgcttccccagtatgacatgtgtgttccttctaagagaaagtcgagatgaataaagacatttaaagatgattttaattcttgagggcttaaaatttgttagtggtttattcgatttttgttatagatagtctgtttatttctaggaagagttttacgtattataatgagatatacaaaatctcttggtttttacattacttaagcccacagagaatagatatgcaatggtacctgtttctaaataaagtgtgtgtgtatttttaaattatttttagatattcaataattcattattaaccagaaagtcactacagagttgcacatacatttgtattccctagataaaattttattttgtagtttttatatccctaaagactttcatctctttggtaaaaatgatccattttctcaagtgtcgtatgtttatttctaaaatttaataggttttatttttaactttagagactaaggctttatagccatatttgcaatattcagcttgattttaataagagtaaatgtgtaatttattttatagtatccaaaggaagaactataataattagatgtaataatcatcagactgggaacttctaatgagtggtcagtatatgttatgtatatttatgtccttcccacagaccgcaatgcctggcacttagagattttttaataaatatttgtcgatcgagtttatctagtcttcataagatgttcccagttttctacttatcttatacagtcttaataatttcatttttgatttttaggcaatgaatggctacttcaaggacagatagcagctggagatatagagaacatttccagtcaaccaacaatttcactacaaattcctgatgattgcttatcacttgaagccattgtatctgtcagtgtgtttctttattactgtagtgcagacagcagtgcttgtatgatgaaggcaattttgttcagtcagcctttacaaataacggatacacagcaaggttgcatagctccagtagagctcaggtatgtattttagccagccagctagctagcaacccattgccaccacctactgtctcccatcctgactatcactgtaatttaaggaaagaaaacttcagttctgcctctggataccaagatgcccattgctcagttcagacaactgatattaaaataaagctatgctccttacttacttcttttattataaacaaattcctttgctttggctgatactagctgagtcattgatcatcattggtaccatgatattgtaatctatgctgctatttggcacaagactgaagttcacactacagtagagaatactataagataatttgcaataaatactgataataataataccagatattttaactaactttttctacctttattaatagcaatcagcacacttgaatgtgtaaatttcacagtaactttaggcagaacttaagctccaggccacatttgtataagaacaccaagtattcaaggcataaagtctgttgtaagccaaaaaaaagtcttttcatcactgtagaagcttaaggagtacatcagtggtaaatacgatctttattctcttctgtggttttctcagttgagatatttttaaaagagagttttgatctatttttattataaattatttgttatttaacataccattatgaatgccttaaaactttgtacagataaagttggacatagaatctctaaggactgactcctttaactgtttttgagtgactacattaccagataatgaatgagtccccagaaatattatgactttcaaggaaaaagggactttaggacacattacttagtgtctgtgataaataatttattgtgacagctaaatctgatggttacatatcttgttttggaaatgtacatttcacttgtaagcattaaatgcagatttgttgagtttaggttttgaggtttttttcgttcccatattcagaatttaaattatgatcatttattgtgatgtttttaaaaatcacttttaagccttaaaagtgaaattttcagtgtgaggtgctttcatgctattaatagatacagtatatcctaatatattagtcttcaaaatattaaggccgaaacagtgatttaatgatactattttttaatttttgttgttttttatccctaaaaaaagatattggaaaggttttttttctattgtcataatttataactacttaaaagcctaatcttgttttccttaagacctattcaacatgtttgtgatttaatcagcttacaagggtttaaaaacatcaggtgaaccatgtttatttattcagtaaatatttatagacaatatggcataatatgcttcccttccctgtaaaaacagtgctaaatttgaagtgtaatcttttttaaacatcattgtctatttttaattttgtttgaaatgtagtattagtttgttttattcataaggttagctgaatctctgaagtaaggatgtataaatcatgacattgatttaattagtcatctactgaagctacttttaaagagaaatatagatataaaattaaaaggaatcctgtttaaaattatatgtaattacctcataaaccttttctctccacaagcaatcaaaaaaatgaaatgttctgtaataaaagggtgtataacatactctcttttatgagaataggccttagttattttattttatttttgagacgtagtctggctctgtagcccaggctgggagggcagtggcgcgatcttggctcactgcaacctctacctcctgggttcaagagattttcctgcctcagcctcccaagtagctgggattacaggcgtacaccaccatgcccagctaatttttttgtgtttttagtagagacagggtttcaccatgtcagtcaggctggtcccaaactcctggcctcaggtgatccgcctgcctctgtctcccaaagtgctgggattacaggtgtgagccaccttgccctactggccttagttaatttttaatctcatttgacttattatgtttctcatttctagatggacaggatgagaatattttggcccaatcattttctgtttaaggacttaaacaatttcacactctaaatgaagtatatacaattttaatttactaatttagaaatatctgagtttatttttcaatataatatacaaacacagtgtttgttatacatgttcatgtacagtgaaaatgcaaaggcattttttagactctattccccttcatttgtctagacagttttaggttagccttagcttatacttttcttgactttcaaaatacagttttattgaacattcttattcttacccactgccagtctgcattgttttttacattaaaagtattatttatagtagactaatatgattttgaataaaatcacacttaagcaatatagataggttcctagaatttatgacgaggataaacctctcacataagaggaagcactagaaagtttatttttaaaacttgttgatccatattctataaggactaatgcatattttttatcttttgcttttcttgttggataaattattatgtccagtgatagtttaaaaagaacaagattttagtgtaagtcacctcacttgaaatgccagtaatgtggtattacacacattttatataatacctggaatctttgccctaaattattctgctggtttgtcgctatttttttcctctcctctttattatttcacaaatggtagaatttcttgatatgattcttgtaaagagtttagcttatcttgaacattctgtcttaagcaaatatttaacaagagaaaactttgtagtttaatcacccataagtgtaactttagcaaaattcaatgactatgaaaaataatttttttcttaactgttctaataatatttagttataatattatcaaaccttcagaaagttataaatcctaacagccagaaaaaaaaatttactatgtgtatatttatataggtgtgtgtatacacaaagattaagaattattcatgattcttttatggccaatatacttttgagcttgtataactgagataagttactctttgcttgtttttctgtagttggaaaatttaggaagttattaaaaatacatatctctataatgtaatagttttctgcctgcacaaagtttactattaatttatgtctaccagttaaaaatacgatagttagatttggcatcacgtttaaccacaatcatcaaaatctacttaaattctatagttaacagttacataagaatatatgcagagggaaaatgtcaatagttcttgtgaatgaaggaattatggatgtttttattttaattctactttgctgttttttttttcttttcagtgagcaatctgttatttttaaaatcacggtggggggaaacccataaagtttaaagagttaaagttaactgaatcgtaagcacttatataataactttttaaaagtcatttttattaccagagctcagaacattgtttggagtcctttgatctaccggttctcttaagtacgtgatttcgtgaagatagcaatggttatggcttttttgttctgttatttttattgtgtaacgtagtgtagtggttaagagcttggattttgcagtaacttggattctaatcctttaaaatggggctgatatacctgcctcatattcaatgaaatattgtgtgtacagcacttagtaattaatgaaactggtaattattagcttagttactgtaatgataatttgggaccataaacacatatcaccctacattttctttgcaactacaatttgtgaaggaaaatctcccactaactattggttatgttaatattcttcatagagttgggttcaagaagagaaatgttttataatgaagcatataactattttataaacaacattgtagttataaagaagcatgcctatagtgttattaaaaattttttgtacgactttctggagctacaagtaatgaacttgctttgagagggtccagacatactcatcctgaaccacattcctacaacatatgcccaacaacctgcaccagagtacttatatcttaaccaaaaagtttcacttcaatggtggtgcttcacaaaatcttcaaagtgctttcatgtgtattgcctcatttgagcttcaaataaccttataaatcgggcaggtagatgttagtttacagaggaggagacagctttggaatagtggtgacgtatctgaagaatagaaaaccggaatagtgctcgatgcctgaagtggtgcctggcgccagcagatgttcacttctgtcaaacaaggggaagtagtggtggagcctttattcaggcacgggtctcctcattcctaactccaagatgcagagggaaaacgaactgctcaattaagagttcttccatggacactttcttaagccttcacataaaataacaagaataatagatatttattgagtagatatttattgagttctttctattttccagcactcatctattaagtgcttttatgtattaactcatttaatccacacaacaaccttatgtgagaaataccatttttccttatttgattggtgaagaagcacacagagagggtaagcataatcaaatacaccagcataaccaaaatcacacatttagcgagtggcagggcctggatgggagtctgttcaactctctgctgtattgcctcttaaagtaggttttcttaaaacataaatctttcataactttatatatttatagtaacttaatccaaagaaccccaaaagtactagcaatgattgtttctgcaatttaaataaatccatttaattatacaactttgcattatatactgttattcagaccttggaacagtctataattgtttgtcaaaagattttatgtactactttttcttaatttcagatattatccagagtttttcttggcagatggatgtattaaaaaaatagctttccagtgttagttctcaacagtgctgtttcaaaagttgttttaaaagttctaacggttggtcttcaaaacgtaattaagaccttatcataaagagccttttgcacaggactatctcaaaccctaagaagctattcatatttaagaaaattttgttgtattaaatattagtccaagtgagctctggaaatacagtcttctgctttcttgtttcataaataacactggtatgcagacccctccccatgactcaaatattaatatatgcaattctgttacagtaaagttttcaccatggtcaacctattccagcattaggtactttttgttgttgttgttttgttttttttttttttttttgagatggagtctcactctgtcacccaggctggagtgcaagggtacaatctcagctcactgcaggctccacctaccgggttcaagtgatcctcctgcctcagcctcccaagtagctggcgctcaccactactggtgcccaccacaatgcccggctaatttttgtacttttagtagaaacagggtttctgttggccaggttggtctcgaactcctgacctcatgtgatgcgcctgccttggcctcccaaagtgctgggattacaggcgtgagccaccgtacccagcctagcattaggtactttgttttgttttgttttgtttttgttttttttgagatggagttttgctcttgttgcccaggctggagtgccatggcaacacagcctccacttcctgtgttcaagcaattctcctgcctcagcctcctgagtagctgggattacaggcgtctgccaccacgcttagctgattttttgtatttttagtggagatggggtttcgccatgcttgccaggctggtctcgaactcctgacctcaggtgatctgcctgccttggccttccaaagtgctgggattacaggcgtgagccgctgcgcccagcgcactaaatactattaaaaggaattaagcaaaatgctacgtaccaatgattatgattcatgatcacctaaacacagaatgcagacttaacttttcattcttagtgtgctaattaagtagtagtatggtgcagtaaggaattttgttaattttgttataaactccctctcctgaaatccgtaaggaaatgtgataataagaaagtgataatagtgtcatattttaaaagtagaatccactgttaagcaccaagattaccttttcttccccctgtggcacagtttatttaaatgaagtattagcaataatcatgtcactattttgtcctgaataattaagagtttgcttttttcccatgtctttgcaataggataatataaagaatagtattaaaagtcagaggctttactaatctacctatatgtattccatggctaacaaaccctggcccctttacatatgagctctggaggttcgcctggctgcctcaggcttgcagaaggctgccccaatcacagagcctgggtaaggtggaacaggaggcagccccactcggcttttctgattgcatcccacctgtttctgagtgtgttggtttggtttaattcttttcaagggttggagttggaaagtgaaaaccctagacacttgctgtggaatgtttgcctggttgtattggtgtgtccctcttcttcactggcatgtcgctttcaagtgtaccaaaggacattttgttctgttgaaagccacaggaccaaaaggaaaatattgcaactatttgcaaacatacttccctacctatacaagcagccatatactaaaaagcactaaacaagcacaaatgaacactaaatagccttataccaaaaagcattcttgtaact

SEQ ID NO: 6897 - DNA, 129447 bp, Homo sapiens
attaaaaaaataagtaggccgggtgtggtggctcacgcctgtaatcctaacactttgggaggctgaggcgggaggatcacaagttcaggagatcgagactatcctggccaacatggtgaaaccccatctctactaaaaatacaaaaattagctgagcacgttggcatgtgcctgtaattccagatactcggtgggctgaggcaggagaatcgcttgaaccagggagttggaggttgcaatgagccgagatcttgccactggactccagcctggcgacagagcaagactctgtctcaaaaataaaaataaaaaataataattaaactagataactcccaaggttctaaagaatcacatcagtagcaaggatgtatttgattatctgaaaattaattcaaaccaaggtgttgacaaccaactgtgcttttcccaagaaaattttttcttttaatagggtgttctaggttggcaattccaccaacatgcccacattctgcttccactgcaaacattgctgaacagtcaatcccagtaccctttctggctggactgggaccacacctcagaaatagacaacattctgtgcagccagtatcatcaatcaggttggcacaacagcaggagatctatctgttatccctgcaaaggaaaggaaggaatgtctgatataggagtgcattacctgaaggtaaagtgtcttggaaaaacctcacttacaatgagtcccttaatcaggagctaacatttcctagataatagaaacaaaaaaagggggtgaatgaagtattatcttgaaagtgaaactaaatattcactcattaattttattctgcaaatatttattgcatagctaccttggtagacactattgttgaccatggggatatactagtgaatgaggcccaaaagtctttttactcaaagagcttaaccaggggtgtccaatcttttggcttccctgggtcacattggaagaagaattgtgttgggccacaaataaaatacacgaacactaatgatagcaaatgagctaaaaaaaatcacaaaaaatctcaatgttttaagaaagtctaccaatttgtgttgggctggattcagagcagtcccgggccccaggttgcacaagcgtggcttacattttagtggaggggggaaagtatacaacaaatagacaaatagctattaaatatatggtagggacagatcctatgaagaagataaagcagaatagaatgataggagaaactaacttagggagttagttttccccaggggaggacgtttgtgcatattacaggtggtgttcccaggtgcaaacgtcctagggcaggatcaggtgcacctgttataataacaggagagaggccagtgttttggagataagttcagttgtctccagggccagagcacatagggcctgagaggccatggtaaatggtaaagaaattatagaaatattactattttatattctgggtataattcaaatagtgaaccaattcttaaaaatcatagagactaaattttacctattggaggggttatacatatttttctcaaaaacattaatagctcaaagtgataatcttcacatcacatttgatactcattacattattataaaaagggaaattacaaaattaattaagggctccataaatttttccaagggccactcttaatcctttgataattgattaattccttttggaattggcatctcagcattcttgtcaatttttattctttggttgttactgccaatacctcacttgtcactggtttttaatgtgattcaagctgttctgcaatatcacttccactggcttcaagaaatcctgactcttttgtaaaaaattgaaatttcacttatcaatcaatttacattgcatctgcattttattgtcagataaatcagagagagattgccaaagatggacttgatgtacactagcattaattggggagggttgtttggatgaagaccaatatcacaaacagtctgtcgctagtacatgtttttggtatcacagctttgcttccctgggcacctttgaatcttcaggagctcagttactgaccactcagataataaggactcttgatatgctgtcctcattggagctggtgaagaaatagattaggggacagggatgggaagaagtttttttttttttctttttttgtggaaaaaaaattatctcttcaggcaagagtcctctctttcacaaggaagcctkgtcattcccaagggtactgacaggaagctacaagtcactctgtccaggccaatagagcaggcctctgttgatttcctggcattgtaaagattctggcttcttgccccagcatcttgcagaaagtgatttctcagaattgtctgttcctccagggatgcgcaagtattttaaattgaagagttgtaaactgagcacaaagccaatctggatgaaacccatttcatccggagcagcccatccgcatttagtaaagttttaaattttattgttcttaaaaaaaaaaaaagctgtgtaaacactgcgccatcataggaagtagaaagaaaatatcatctgtaagcctcctcttcaagcacagtggcattgttcatcttgtctcaagctttgtttatatattcttatttattataataatactaatgaaaataaggataattagcagcatttatttactattttttaaatttgtcaggcatgtcatttaatttaatcttcataagaacccataaaataggtcattattatctttattttacagatgagaaaattgaggcaaaagaggttgttcatgtttaaactattagtaagcggtgggtcttgagtcttggcaaatctggaaatttctttcttgacctctacactgttgctttatattttgcatatagtcaagtcaatacattagaattaacaattttacaattaaactaaactattggtattagatctgatattcagatattggttttagagcactgatagaaaaatgagcatttaaaattgagcacttttaacatgttaagtgaattaaccatattcaaatctagcatcttcatttttcctttattttacttatattgtatacaatagaattgtacatataatatacattatgtattttacatatataaatatgcaatatatttatattaaaaatgttatgatgtcagggactgtgtctgtcttattcataactatgggatagtgataagcatgtagaatcatttgttcattcattcgtttaataaatataccacttaattccctttgcatttttttcctgatatattcaggagttattttctcaaaattcctagttatacatgatgctaattgatgatatatttaacaaaaaattattttggtcttcaatgaatttgaggaacactgttaaaaacagatgaaaaacttctctttgctacctaatgtgcattgtgaatttataatatgcatcttttccaaaacttatttttgaccatgtaacttttaaaacattttcctggattttctggagactagaatttcactgccacttgggaaatactggcctagaacttacttcttcataaactcaatattaatttttctgctccccttttcaaaccctcctggaattgttctttagtaaagctgagggtctccaaaataatcatatgttgtacgatattcatcagtattgtcctattccaagttgaacagtacaaaacatcataaaagccarttaaaaagccacttacaaagacaatttctaaacctgatttaagatgaaaacaaatgtcataagaattaattgagaagtaaaaattaaaatggttgattttgttatatactgccaaataatgttttttcagggatgttttggtttttatccataatcaactgtatcaaccagttgttttcattgtatgtgggtactgcctaaaacctaattttggtccttcctattcacgagttgctgagaatttttatttcttttccttggacattattgaatacttgcatttattgggtacatttgttatttcattttattttcaaagggcccaattcatttcatagaatgaaaaaaaaacagtatttggcagtatataagaaaatcaaccatttaattaaggttgttcttaattaaatgtccaagtcctatttcaaattaaaagcattgaacatttccattacaagtggatcactgggagtatttataggagaaaagtgtgatctttctccacactggaacacttggaataaacaccatagtcaatgagtacaaggggtttctggaaattaacaaccatatgggaaattaacaaccatgtaatctatgaaaccataagtcagtcagaaggctgaatatagacttaccttcatcagtctgaataaacaaagaacagatctcactttgaaatggctaaataatgaatacagtgaagcagcgatgtctcttactcctgaacctagctcaaatgaaatagtaggtggcttcggaacaaatatgtactgtatagttatacatacaaaggattaatattcctgaacttattttagtccatagaattcagtctaagaccatattaggtttttatttagctgattttaaaaatatttggagagaggaaagcaaaattgcaaagaaccttaatgaaacctgtttttctttgaaaactcaatttttatttttcaaggtataaatttaaaaagttaaaatacaactctcatacaaacataggcaggcagcagagatctattcacttattaatggggaaaactgtaagatgatgaagctggttccaaaagcattttgaggatctgtggatttacaggtatttagaaagaaagtttggttagatgcaaaatgattatttggttagatgcaaaattggttatcttcctatattgcaataaaatcataaacgctgcgattatctttttctctgaacaggctgaataaaatgtgcaagtgaccacagaacttcactgtggctggaatctaatcaatagtgaagagcaaagccaaacacaactggagaattaactggcccctgggtggacttgttaaccgatgtctcagtttgacattgaaaggtcatgctcttccccattatttccaagttttggtaaagtttttaattgcccaattagaaaaattatgagttttttgttgttatgttaactcattaacttacataggtttggactaaaaaccactatcctagctgcttctgggagtagaaagattaaaaagggggatgggaatcttatttcaaaattcaaataaaataattcaaattcaaataagaatctttaatagatgctacatcccatatccaggtcaacatggcaggagaaatgaacaatacaaagagggcagaacaaatatccccaagggaaagaagccagtggggggactgacagtctttcctttccctaacaaggctgcctttattcaaagggatagcgtttgcggattccgtctctccatcctttgtaaaggtgctagctagggagccgagctcaagcgggctgctctaggcatagcaagccccaccccttgcacggtgtcctaatcaccagctaacccctggaatmaattctccactcgccctgcgtgggttcattcacagctctgtagtccggggctgggcgcttcctctctgggactgaaataagagcgctctagacagatcaggtgtgatgcagccagccctgctttagagcctattctttttcctaggcaacaaaaaacacacacacaaaataaaacaccaaacagcagcaatatccccctcccccttcttgttctctcctgactttttctgaacgatggatgaatctctgcgagcctccatccctgggggtggggtgggagtgtggggggttggggtgagctctgtaaaattggtaggagacatgtggaagaaagcaagtctcccgggtatttcagcacttcggcagaaacactggggcattctcattgccagcctcggggggtggctggcacaaagagcccaagattaaacgcggcgcctgggctggcgaggtcggggtcgtgtggtaactctccaggtgctcctcgctggatcccggggtcccagccccgccgccgcgccccgcccagctctgtccccgcagcctcgcgggctgccgggctttgtggttcgcccgtgccgctgggcccctgctgggggtgtcgttacgagcatgtgcagacagcagcccaaggtagagcgagcgtgccgggcgagcccggagacttgccttgcaatgccatgtttgtgtatgtgctctaactcccggagagcaatcagggagacggctccccggccagacttggctgatgttttcttgtttctgtttcagccttcaggataattccttcagcagcaccactgtaacagagtaagtgattcttaccrttaaaattagacttgcatgcctttctctggaagcaactatcgtgaaggtatcctccaccgttcccagccgctgttcgttttagatgcattgtctcccggaatctggggctgtgaagaccgtgagacgtgctgactggtggggcccagaaatctttacaggttgaaaccagcattttagcagctgcgggagagaaattaaaaccagctgattgcttgcaggagctcagtgctccaagatatgtgttcttggagctcagatttttaaaaatccatttgatgtgttaggaagctttgttgtattttgccaacattggtgtcagttttcatggagtgcacactatatacatttacagcaatagaagatagatgtgaaatgagctgaattccagcatgtggtaaacaggctaaacttatcttggccctctcttgtctacagatttttaaggcatatcagagtaaactttttgtgcatgccctttgtcatgtttgtcttctgactacagagatgtgactatgggacgaatgagtcacctagtcctatggttaaagctgttgattagggcaactaacacccttcaaacatggaatgaaggagtgtgaatgaaggagcgtaccagcaagcacagtatttttttaaagatatttatatgctatagttttaatttttgacatcccttccttaatgttttcctaatattatactatatttgttaaaaattaacaggtagtgtattttgctaatactgtatgtaatttatatatacatatatatatatgaatatgtacttcatctagcattctttctctaggctaattcatgatgtttacttctgggacctttgtagaagccactctaaacatcttttcaggaaaaaggcatgtgtaaagttgtatcctcaactacatttaaaaaatgttatgagtttgatgtagaaggcttaactaactggggagctgtttgctaaaattccctaaaaagcaaataaatgttttgcttttggcttccaagtcctgccactatcacaatgacttggtgagggagggataaggtttacagtgcttcctaggccctcttgttttccacattcttttgtttctctcttttgctgtgctgctcctttagtgtccagttttgagcagacttaagtggagtcacttaaaaaaaaaacaggattgactttagaagaagcaatgtaaaatactcatttggacccacattctgtttataagattgcttggtaacctgtgctgcaatgttgcttttctaaaggcctgagagaaggggagagaggtgtgccaaagtgtgcatctgcaggccgaagatgaggcctggacttcctgctccaggtgcacaggtactgctctcctccctttgctgtgcttaaagtactaagtgctttctggccccgattctcaggagcctggtgtggccaaatcctcggtcagtcacaggcacrgcaggttcaaaatggagacacttagctccagatttcacgtggacttttttttttttttttttttttttttctgtagaggtttcgtggttaaatgctggggagagcctggtgccttgtctttggacactccccaaggagttctgattgcataagatcatgtttttactttcagaggagtgacagtgatttattttaaaaggcactgagagataattggtatgccatttggctaatataaaaatctaaggagcctattgagaacataccaaaagcttcataggtataacacatcattgactaggactgtttaaaactagtcattgccacaataacattttcccctcacctcagtaatatgacccatatcccgtgcttctctgggcatgaccccatagccctcaggaccaaggtgctatatcctgagacacagacatagcaggttctcaggaaatgtttgggtgtggtcttggcctacacggaggagggacttttctcccctctatgttctggatacaagaagagctcctctgcctcctgtccccaccccattcctacatccttctactcacacccacttattttcttcgatgcctgaaatttcacctasagatgatttctttggatgaaggcctctggtagtgacccttattaaattggaaattaaaaagtttgtgcccttgggaagtggattcaaattgtcatgaatactttaatatgaattattttacctaacctattttctaacctgttatggttatggttatgcttggccagctgggagtcctagaagagtcaaggggaaagggaaattgggagggactcaaggacagattttattttcttcttggtttttcccagccctggcactatctatgcagctctagacaaattcaatttctttttccaccccaatgttttcatcacaatggccttggccttttcttccctatctgtggcaccttttcatctaatatttttccatggtcaatcgtgacattgccccagctaacttgctattttaaatgaagcctgcaataattctgattagttatcattcaaaccagtggttctcaaagctaactgatcatcaatatcaactggggaaggggactggagcttgtgaaaattgcagtctcccaggttttatctcaaagtgggaacccagaatgggtgattgtattggtgtcaggacagtgctgttttggggtttggaaacctttaggtcagtgttaaatgtttagaaacatagtagttctataggtaggcagtctgttttaaaaatccacattcctgggctctgccctcagagagttgatgtagtggggctggagacttctgttttgaccaggtacttcaggtagtgctaatgcaaggggccacattttgagaaagcccacaggaggctgtacctctgcaactttgccttcagggaacatggtactacagggcaagtgtaaatatctttatagcacaactacattttatctaacagtcagtctgaggcctctcttctgttttaggcagcaaaaagaacttcttgtgggtatttctttcaccaccattattctaagaaatggcatgccctgtctcttgtgatcctctggcatatagactgaagagattatttgtttcttgctttttgggcttaatgtggtggagcagaaacaatccaggcttcaccgattgaggccttgggatcttgacttacaacttagcccaggtgcaaagataattcctaccttggagcattctcaggctggattgagattatgtgaaagagcaggtgagctgtgaagtaccacacaactttttcttgtttgtggctgattgagggagcaaaagttcaaataggaagcaaagtagcaaccctgagcatttcacaaagaaataaggggtttcagggaaaggacagaaatgatttattaattgaatagaagttgatggtctttaccaaggtaaatgagaactcaaatgaactaaaagaggttgtaaacatgtgccatgtaagccaggaggtagctctatttcagttgctctatctgtgagcttggaattgtgttctttgagtggcaactggagttgcttagtagacatgaatattggatcaactaatcagctccagcttcatacttcagaatcttctccaactttgtatgttttggtgccaagtttccatttttaactgattgtactttgaggagaaagattaataaatcaaatgagggggaaaaataagttcttgccaaatccccaaacaataggtattgttgagctccagaattgaagctccaaagctctgcttaagccctagatctttgaaagcaacaattctagatttttgttcttcattgatgttgctactttgctattgaaaaacatttttatccacattacaaagctcaggtgatctattagctgaatgctgctaatgaaggggaacaaagcggtacttggggatttgttttccatgagatggacagagtggactattggcaagaaagtaaagaaggttggtttattctagtcaaagcagcatttttttttatgagacagagtctcactctgttgcccaggctagagtgcagtggtgtgatcccggctcactacagcctccacctcccaagttcargtggttctcgtgcctcagcctcctgagtagctgaaactacaggtgtgtgccaccacacccagctaatttttgtatttttagtagagacggggttttaccatgttggccaggctggtcttgaacttccaactcaggcccaccttggcctcccagagttctgggattacaaatgtgagacactgcaccagggcaaccaatttttttaattgccagaggtaacaaaatatttcagtaagtagaargggttagagtctgtgggtggcctttgtttaactcactacaaaactataaattaaagattttaagggaagaggactggattcattctgtgggttaattatacaccattgccagtaaagaatactttaaaatgttaaattatttcatatagtataaacagtatattatggttatatttatgtatgcaggcatttatttgctttatttttgtctgctgattacattgtgaatttcttagggcaggattcagatctttttcaaattttgtgtcctttagaagcagtgctacataaaatgtgagtctccaaattgtttaaaacgtgtctgagacaagaataaaaaacagaaatagggagtaagtatctcataactttaataggaatttgacattgctgtgacatttttaccaaagtgtttgtccacagtggtgtgaaaataaaaaacaaactggtctgtcctaagccctgagagtttgcgaagcacagttccaatgtctaatgcagtgcctggattcagtaaatactcaataaatgctggttaaattatttcagagaccagacctcttagggaacaaagttaatatttcaattcaagtatttttgactgtctctggggtactctggcactgtggcaatatatctaggaaaataaattacagttatttctactcatggaattaataactaatcaaaaagatctcagtggtacaaaggtttacaagtgatgtgtggtgagatatagttgtttaccaaaacctcagaatgaagagtaaatgtttatgaattaaggttaaagtrggaacttggcatgtgtattagtcagggttctctaaagagacagaattaataggatatatgtatgttcgaaggggagtttagtaggagagtggactcacatgatcacaaggtgaagtcccacaatagtccgtctgcaagctgaggatcaaggaagctagtttgagtcccaaaacctcaaaagtagggaagccaacagtgcagccttcagtctgtggccaaaggcacaagagcccctggcaaatcactggtgtaagtccgagagtccaaaagctgaagaacttagagtctgatgttcaaaggctggaagcatccagcacaagaggaagatgaaggccagatggctcagcaagtctgttctttccagcttcttctgcctgctttattctagccgcattggtagctgattagatggtgcctactcagattgagagtgtgtctgcctctcccagtccactgactcaaatgttaatctcctttggcaacaccctcacagacacacccaggaatgacacttggcatctttcaatcaaattaatactcaatattaaccatcatagcacatgactgagaacatggcacatgggcgaccttggctgggaaggtacagagctggggaaacctgacttgggcagtgaaggatgagtaggagttgaagatggaaaaagtattccaggcttgaatggggctgagtgggaatggttgggaacaggaacaaaggcttcatcctatatactagagcgaaaggatggtcctactcctggttcccctaggcaggatggagaactggagatttttcaatatggaagagacaagaatttttcataaagttaatccggaagttttatgaaaaggaaccccttccttttcacaagatcaagaaaatctgagaccaatagagtaaactaaatggaggctggtttggtttgggactgcctgaagcagaaaaaatgcaaagaggcatgtaatggaatctcttttgagccaaccagtattggtcttgaggataccagtattggtgtccaatgtcccctcaagtgctgtgaacacttaggtccttgttagtttaggtgacacaggacagtggaggcaaaaaggagagtcacatctggctctgagcttttaagctcacatgatatgacaacatttgcatcataaactgggagacataggaatcagaacttatttgggagagaatgatagggagtgtttcatcttttagttttccatggtaatcttgagacaattctagattattgctactactgctatagcagacaattggatctgatgtgatttttcttcccactcttccaggtgtgacgaagatccagtctctctacatgaagaccagactgattgctccagtctcaggtaaaagccaccattgcttggttcatatttgtgagagacagaagccatctaggtctggtggctttcctttgaattctagtctcttctttgaattccaattatttgttctcatgtctcatctcttctactagatttttacctcttgacaaaatttttgtcttttccgcttttggataccaccctcttagcaatcaggacagtaccttacctgtgggaacacttgataaatgcctgttgaactgagtattgattagcctatctcaatattctcatcacacaccctaaaggaagaggctgtagattattcaccaaacatattaytgagtgtctgtagtatggtcttggtcatcaagggcttatagtatcgtggaaaaaccttcactgctaatcatttcttctacatttactttgttccaagccctttcatctacattttattatttaatctaaactgaaaggaagttgatgtttcctttctcatcctgtagatggagaaactgacacttaggaatgatagctcatccaagataacgtagcactatgaggcagaatttagacccaggcctctctgactttaaagtccacttactggataacaaatatttgttgaaggccaattttgtgggcaaggagccagccagttaagatttgggatgaagaaagacaaaccaatgctgctcctaagaattcagtttgctagaggagataggctagaatatagatgtggatgctacagtgcattgagtgctactatactagaggtaaatagtggatttacttagaagaatcaaacagcccagagagctttcttggattgattcctgaagaacattatacaaggcatatggatttttatttattttttaaattattattattattattattattggtgaggtccaaggctaagaaaaagagaatgccaccaagcagagggagcagcttcctggaaagccaatagagggtagagagaattgtttgagttgcaggaacagcaagtggttcaggatggtaggaaccctgggaacctggtggagtgaggaagtaagaggtaagataagatgtgaagctctagaggtaaacaaagaacagattttcctagggtttgtgttccttgctaaggagttcagaattatcttggaggcatcagagaaaccaaaaagaactctctctctctcctttttttttcctttgcaaataaccacatggctaaggccctgcctgagagtaacaatagctttcatttattgggttgcagccttgggtcagctttctatggtaggcatttcagagagactgtattatctctgttaagcagatattacatctattttatgaatgaggatcatagaggtgaagtgatgttgcccaggccacacaactaataagtgggaggatcttttagactctggcttttttcaggacaccatgctttttctcagtcatgatttattccgataagtagtggcataaattacataacctgtgcttttctgtttcggagatcctgaggaaccaataatatgtgagaaaatatgtttctaaatatgacttttgtaaccaggttttacgtttgtgtaatgcaagaaagatgcttttggccccctctcccctttcctggctttccaagtcaaggaagtaaacaaaattacayttctaaattttgattgacttgaaaacatgatataaaaacaaagttcaggtattattttgggaatgagtctatcaaaagagtcattttagatttgaaaagctattttttaaaattcttgagtgttctataatcctactcgaatgagggcatttaggtaactgtaaaggcagctgttctttcttttgtttctcatgcaggatcatggagtggatgggtttctagtgagaaaaatgtacttcaaatgaactagtatagtttccaattcatggtttgatattaatttccaaatctatgagtgacttagaatttttttaattgtaaatgatctcacagctagaatattgaccagtgtcattggcattgatttgtttttcagttactaacattaaataattattgtaattgttggattctcctttaccagatagcactacgtttgttctggattcaagtttaactatgtcacgyagttttatttttatatcttgtccaactgcaccctggtcatgttccagaccacctatcttgatatttgctttgctcttttcccaaagactacctggaactcatccttcctgatgccagctcagtgaatttaatctgccttttatttgtaaaaagtygtcttgaatggtgggcattccttctttgctggtcttgcttcttggctttaggtgtccttgagcagctaggaattgctttccaggtgactttgcaaatgctgttttatgggtgcttttggtaaggaagcatgagggaaaaacaacacctgaaggaagcggccacttctcatgcatttcatgttctagtgacagtgattgtggtagattaaggttaatgatattgattatatagagaaggccccttctkgttatgtctgtggtgtttgcttgatacttagcagaatgaaaaataaaatgcatctagatttaagtgggaagaatggcttcaaataagagtgttatcatgtcagtatttttgagaaaattgtaactggaggggggtagggatattgtacagaatttgattgttgaacgaagaacacaagtgccatcccagccctgaatatatgaagataacaccgccctcttccatcttcttcagaaccagaacttggacatttggatgtttgactttgcattcagggcattgttcagagggcctggttgagtaaaatttggcccatgcctatcaraatagatcctgttaaatttctaagtacctctgaaagttgtagggggatgattataaactgacattgccaatgaagaggaagcatggtgccttgaaccaagaacacaggtgtgagtctggagacccacatgaggcctctgggtctgtgtggattagtccttccattaggcgtgtgatttaatctcttagagtcttcatctataaagtagagatgatgatatctcacctgaatatgtcacattactgttgtgagagggaaatatgatatatgtgaaagtttcttaaagtgaaaattagaaaaataataataatgatatgtgtatagttacacctacacaaagtatgtattcattaacaaagatcagaagggaaggtgaagtgatatagagtgaaattcacatttaagtttttgttcatgcaaaattgtctaagtgtaggctaaaaattttgcgaggtgtctatcctataaatatagcagcaatgaatatctccagccctctttcctgcagcagtttattcatctttttttaaggtactttctaaattgggtctttcctgttttagagatgaaaacaataaagagaactaccccgacgcaggggctctggtagaagagcacgcgccgccctcttgggagccgcagcagcagaatgtagaggcgaccgtgctggtggacagcgtattgcgacccagcatgggcaacttcaagtccaggaagcccaagtccatcttcaaagcggagagcgggaggagccacggagaaagtcaggtagcagctctctcttctcaggcttttgccaagacgggtgattcttaggctaggscacacggttctggcagacgatttgagcgcactgttttgcgggaggggattggcacgacttgtcattgcgtgctctgccgacctgagacacgtggaagctcttgcaggttaaaagttgggtgctctgagccggctaataatttggtgccccttaaaacgtgttcttaaatattggactttgatttattttttaatttttatttatttatttttatttttggagacagagyttcgttctatcccccaggctggagcacagtggcgccatctcggctccctgcaacctccgcctcctgagttcaaacgattctcctgccttagcctcctgagtagctgggattacaggcgcctgccaccatgcctggctaatttttttgtatttttagtagagacagggtttcgccatgttggccaggctggtctccaacacctgacctcaggtgatccacccgcctcggcctcccaaagtgctgcgaacaggcgtgagccaccacgcctggagattggactttgatttaaaggagcagctgcattcttttgcggggaagatggaggaggatctctctgttgtcattcatccaggatgttttcgtgcctcagacgtggggattctgctcagcaaaatcagaagtctcagtttcatccagagctattcttttaggctgaagtttagcggactggaataaacatactagtatgtatgtgtgtgtagtatctggttttctgacgtcaattagtatttaaatgaataaaggaaacatctttccaatacattttgatagtaaatggatattttattaattaaaactttttttgtataagaatgtagcaaagactattaaaatccctgatacatatgattcatgatgctttttttttttttttgagacagggtctcactctgtcaaccaggctggagtgcagtggcacaatctcaggtcactacaacctccaccgccgggttcaagtgatcctcccacctcagcctcccctattagctgggactacaggtgtgagccaccgtgcccagctaatttttgtattttctttgtagagacggggtttcaccatgttgaccaggcaagtgctgacctcaagtgatccacctgcctcagcctcccaaagtgctcgggttgtgaaagtgagccaccacgcctggcctttctgatgcttttaaaaaagattgaattatctactctaactcgtaattacaaagtggtaatatttctatagttgagattttacgtgtaatgcacctaacatatttttggggacatggaagttccataagcgttaactttgcttttttgttaacatttagatgttaactttaaaaataatgtgggaggctttaagtgtaataggttaattttgtaataacttttaagcccagtcctgtttagcaaacatgcatcaggagatcttcctgttataacaactttggctgggcaggttttttaaccatgcaattttgttatttgctttgtgatttttatcttccttcttccttggcattgcaacctcttatttagtcagttaatttcatagtgagatgaaaatgccctctgcattaatgaaggtgtgttgtgatgatcttaaacagagtgtaactcttgttgcagcgaagtgagtgtgaaataccatttgagttatgataagcttgagattattactgaatgcactccagcacctaactaattaggagagtcatgctggggagggcacaggttccccaaaggctgcccccaggtctgactgatcccagggatgtgctgaccttgaatctcctaccaggagtcacgtatgacatagtaagtttcagggtgaccagccatctctcctcagactaccctctttcttttcatcctgtagtctggcctcacagaaattacacagttgtcacttgtaataaggtgctaatggggcatgtaattcccagcctgttgctcatacacaggtagatttcaggggagaaatgtgcttgtatagtctttgctcataatacagcattggaatcctggactgcaggtaaaattcccactggaatttaagtggcctgttctatctgatacaatgagcttcattctcaaatgctttccattccaagcaagacatttgttgaataatggaattttccaattatattggggataaaagaagacagattattattgaatgtatacaaattatcctattgccgtaagaatgtaaggacacttggtatgagtttctgaactctggggatcrgtgagactcggatgccatttttaaatgttttatttcagtttatattagcagcatctactaaattgttgtgaattacagatagttgaagtatagagaggacttcttatatattcaaaaatagaacaataaaaataatatactaaataaataaccaacataaaattttccttggtagtccattcaatcttattattatttttattatttgagacaaaatttccctctgtcacccaggctggagtacagtggtgtgatcatggctcactgcaacctccgcctcccaggctcaagggatcctcctgcctcaacctcccaagtaatggrgactacgggcatgtgccaccacgccctgctaatttttttttttgtatttttagtagagatggggtttcaccatgttggccaggctggtctcaaataatctgccctcttcagcctcccaaagtgctgggaatataggcatgagccactacacccagcctcagtcagtcttgtgtaattaattcttgttcctcttgatcttgggctagtggtatcatgaagctgtctgcttctccactaaagttctacaaatcctgactcagcccactggtgtcatcagatgcctgtatccaagagtctgtcatttgaagtgtcaattgtttaaagtgtctggtcctttactatgaggctcttgagatttatctttgccaaagacacaaactgtagcctaaagctgaataaaacctcaggcaaccattgraggaaaatgtaaccatctatagatgacagaaataggaatcactgtggttagtttactactgataattttaaaatgtgaaaggtctgatgagagtttataataagcatagcacgtaatgtgacatgcaaaaaaagacagtaaaatcgttccaccaaaattagaatgtcttgaaggataatgagtaagccgatttttaaagaagtcaaggaatgttatttctgattttataaaaatgaatgaatatagtttttacagagaaaaaaaacctcaagatataatactcttaaaagattcagctgggcattgtggctcacgcctgtaatcccagcactttgtaagaccgaggcgggtggatcacaaggtcaggagttcgagaccagcctggccaacatagtgaagccccatctctattaaaaatacaaaaatcagccaggcatggtagtgcacgcctatagtcccagctactcgggaggctgaggcagaattccttgaacccgggaggcagaggttgcagtgaatcaagatcatgccactgcacttcagcctgggcaacagagcaagactccatctcaaaggaaaaaaaaagattcatgaagtctggagtaggtcattaaactcaataggcaagtctcatatacatccctgagtaaaagccattggcctagatgtagctagattcaaatgagagaaataactgtggataagtcaacattctaaataataactacagttatcactgctcagtgtcattctctaatatcaggcaaagctccaccaggacttggacaaatatgggagaatttgatagaactatttcataasagttttgatcgcagggtaaatgtcacattaattaggtttaccatgcagtatggttgagagagtggttctgtttgtaaaggtggatttatttggggcaacttgggcttatgttgcagctacaaatcttacctgatgcttgctgccatcatcaaaacactgagttctaatgagtgtgctatgggatcatcattccccaaaatcacttataaaggccctatgggcataacctttataaatttaaagacaaccctctttgaaactgaaaagcaccatcatagatattgcgctactgccatattggggttcttttttttcacaaagtttggatgtaggacctcagagtggctcttcagtctgatcctaaccaggttaaaaacaaaggtgtaaataatcctactgtaaagacacatgcacacgtatgtttattgcagcactattcacaatagcaaagacttggaaccaactgaaatgttccatcaatgatagactggataaagaaaatgtggcacatatacaccatggaatactatgcagccatataaaaggatgagttcatgtcctttgcagggacatggatgaagctggaaaccatcattctcagcaaactatcacacaacagaaaaccaaacactgcatgttctcactcataagtgggagttgaacaatgagaacacatggacatagggaggggaacatcacacactggggcctgttgcggggtggggggctaggggagggataacattaggagaaatacctaatgtaggtgacaggttgatgggtgcagcaagacaccaaggcacgtgtatatctatgtaacaaaattgcacattctgcacgtgtaccccagaacttaaagtataatagtaaaaaattaaaaaaaaarataggtgtggggcagataaaaggagccagatggtaactgtctaaagtttggcctaatgctccacttttcttacctttattctgatcgccaaagtcagaatcagaagttctacttctggaggatcagattcaaattttagtttgagcaactttcctttaatgttggcaatgaccacttatataagaatgaaccatgggtggggtggaggaatctgagattttgtgtgtattcgtgaatgaaagattccagttttgcaccaactttgagtgaaaaaatggaaaggggagagatttagttatatttactgatagaacagaataccaggaactggaaggcaatgcaagaatgcccccaaataagttaaggtatttagaaggagaacgcttatttgaatwggaatcagttttcctttctgcttgtttatctcttttttccttagacaataggctttgcaaaagaatgccttaaataaggaycatttaatgacctgtctcctggaaagataggttttagggatgctattgccagagttcattgagataatgaatcctgaagttaggagatgttgagttggttggtgctaagsataaactcctgatcaaagtggaatccagtgacagtttgcccttatgtgatatctaattagatagaaaacaccctttccaaaaaggagaactgatttaaggcacagattatatgttgtaatagtttgtgaaaaattaacaatgatcctgtattgatcaccatgtaaatcataaaattaatccctgacaaccaaatttggggaggatgagacttaactaatggaaccaacttcctgtaatggacctcataactgtccagaaggcactcatttttagcaatggtagaggcagtcttgtcatccccactcygtgccatctggcatcatgctatgcactgtcctgctgccctcccctctggtggctattttagcagaagacaaaaagtaggaggctatatagagcttttctgcagtgagctgtacactgtgatcatactgctaatccacttccttggggagaccagctgtttggtctggtgtatatcagcatcaggtttcttccacttggccctgtagatgtgttaagaggctgaagagaaatctaagtctgattgtgaaatcttcatttttatctttctacagacacaaagctccctagatgctttcaggcaaaataacctaactataaaatatttactatatttctggtattgtagagcatagttcttattcttactgtattacactctgaattaaaatraggacaatrgttaattctgggccatttcyaccctcccctacaaaagaactaagattatgttttcaattatggacgtactttatatgcatttttttcttgatgtattactgatccagtgagcaacttcaaacagtaaaagcaagaaaaccagtacagcttattgactttgaaagcactggaaagctaaaataaaccttgaatagaattccactcccttttcagtgagaggaagacttaggttctgattatggctttgagggctctattcttgcagtgtgtctaaagcatgaattcwctgagatcctaaaaattggtcttagttagacaattgttttgacaccttagttcatgttgtattatttctcatgcatgatttagtagctccagtttacatgttttacttcagtttttgattaggtgtgggtttgctggaagatttgttcctggtcaggaagaaaagtggtcctctgggtttatcttccaagttctccttcactcttccaagataaaatggtgaagattcgggggacagggctctgagaaatgcagggtccttgaaagtgagattagctgagtcaaatgtttgggtttactggtttcctgtggtctatcagattctgatcctcctctttgaattaacaagtctattgttaaggcttaatgattaagccgatgaaaaatggtatttttaggagggaacctgggatgtctgtaaaatcactttatcactttgtttttggaaatatacaaatatattcagcttaaatactgacatgaaggaatcttaaaatgaagtgatgtacttagtttgcctgggcaatacatctcagaaatggaaaatcctagtactcagacagaatttgcattcaaaacaatgtaatttatttgagtcttttaagttaaccaatggagaatttgataatttggtattgtagcactcagggccgcattgcataactgatattccatctgtgatggaagttacagaagaatcctccttgaaataataaacacaagcgtatcgatggtgttggttgagtatagcaatggaggatggcaaggactgatctctgcttacatgctgcttggaatattaaacagaggtgcaggtggctgccatacaggatgactgttaaaattgtccatttgccacttcctatgcatcttttacatacttaaataaattctaatttaaagaatttacggtttttcctatatagttccaaagagagtttctaacattatatggccatataaattcaggccagtcaagatctaccgacacatagagagaagaagagcgtccatggggcacctttgtcctattggtacctgttgtgcctccattgggttccgagacctgctgcctctactgtggagaagtttcctttaataaactccagagataaatagttgagtatcagtttagtgatgtggtaaaatgcatggtctatagctgcagttggatatgagttcaaattccttctgctactttctttctgtgtgactttaagcatcacttactagctctgtgtcatttttcctatctttaaactggagatggcaattgtatctatcttaagaggttgttgaggattaaagttaatgatataaacgtaaacattcaaattttaggggattagaagtagtttacaggccgggcgtgatggctcaagcctgyaatcccagcactttgggaggctgagacgggcggatcacgaggtcaggagatcgagaccattctggctaacatggtgaaaccccgtctctactaaaaataaaaaaaaaaaatcagccgtgcgtggtggcgggcgcctgtagtcccagctacttgggaggccgaggcaggagaatggcgtgaacctggggggcggaacttgcagtgagccgagatcgcgctgctgcactccagcctgggcgacagagcgagactctgtctcaaaaaaaaaaaagaaaaaaagaagtagtttatagaggccgggcgcggcggctcatgcctgtaatcccagcactttcggaggccaaggtgggcggatygcgaggtcaggaaatcgagaccatcctggctaaaacggtgaaaccccatctctactaaaaacacaaaaaaattarcyrggcgtrgtggcgggtgcctgtagtcccagcyactcgggaagctgaggcagaagaatggcgggaacccgggaggcagagcttgcagtgagccgagatcgygccactgcactccagcctgggcgacagagcgagactccatctcaaaaaaaaaaagaaaaaagaaaaaaaaaaagaaatagtttatagagtattttatagactcatttggctggcaaaaacacgaaaacctccttaattgcatatttcatgtggtgggctaggctgaactctgctgcaataacaaataacccaaatacgtagtgatttaaaccaacaaaagtgcatttctcacacatggtacataaccatcattggtcaccagtaggtgtctgttcacctcagtcaactaaagactcaagtaaatgaaacagttgtagtcttgaatgttgctagtttccaagttagagagcaagattttttgagggtcctgcaccaactattacaagctccaggcctgaagtaacacacagcatttccattctctactaattgtccagagctggtcaatgctttgccgtaaccataaccccataactcaatggaccaagaagtacaattctatagtatgtcctaagggggagaatgaaatactggacaatagcactaatgacttccacatcctctactcaaagtagcacataatccaaagcaagatgaagttaattggtcttttttcttttctagcccttcacactactgaagtaatgttattaatgtgaaggactaagagaagaaaaagaatrttaattaggttaattaagtatcaccaaaggatatacgtgctattatattattgttttgaacaggaactgaagttttgtagaagcatcccttcagtgaaacacctgcttcattatgatagggaacaaagaagtaggtctagcattgatttcttcttttcttccaaatgaaacttcaagctcattaattttgctattttatttagraataatcgtggtcttgctctcgctataagattggagtgattttgggttatgccagctgaacctgtggtgccatgatttagagacattttaaaatttgattcaaaaatactttctraagaaaggggatttaacaatctggatattgtcagatatgggagctgggtttctgcacacacatacatatgcaaatgcacatccttgtgttctttgtgatatttatccaagagcagggtgttctttaggcaaagaaaacagcttatcaaggacttagcctgttttggagcttagaagtaaagctgtttggaaagtctggatagcagaaacaaaatgaactgacattttgggtaactaagaagtgcccatcttaactttattaaacatggttaaataacactcaggaactgaggcataacatattaacctcaagtctgcaatttcggaccccatagttttcaagagatgtagttgccagataaaatatgggatgcccagttaaatttgaatttcagataaacaacaaagaatagttttagattaagtatgtcccaaatattgcatggggtatacttacgtaaattacttactaaacataaattcattatctatctgaaattcaaatttaactgggcatcctgtgtttttatctgctaactctgggtgaccctatcaaaaatgaatggcatgaatgtttaatcaaacgcaccttctcctcccaaggtagaaataaccagttgtactcatgtggtctgagagctgccaggattttttttttttagttcaaactttaaagggtaaagtttgartggaaaggaagttagcagactaagtctaggaggtttgtttctctatttattttatytttagtgttcaaacagcatgaaacatcctggaaaaagctgctcactctcttgggataataaagccttgaaaatttgatagatgttctcaaaaagtttgaaaatctgccctcaaagtctgcacaccaccttcccataggatactgcttgccatgagcagaggctgtcatcaagtcaataggaaggctgactttcatgagccagcttctgtgttaaaatgatcaaaagtgacatcgctcctggcacaaatatacagaacaatggtgccatgttttgagtattaatcctgttggagataagcagtcagccagaacactgtggctttgaaaactgctgctctagactgaggctagtgtcacaggtgaggataaattaactattttaagcatcattttattatgtagatacctctaggcacaggtaactgatgtgcttgaattatgaaggaactttgccttcccacccaacaaagctcatcgtgttttgttattaatcatttttatttttgctgaaccctctatacctctactgcttatcagttgtggccacaattaggggatttctttctttctttttccttttttcgagaaggrggagttttgctcttgttgccgaggctgaagtgcaatggtgcgatctcagctcacygcaacctccaccttccgggttcaagcgattctcctgcctcagcctcctgagtagctgggattacaggcatgcaccaccatgcccagctaattttttgtattttcagtasagacggggtttctccatgttggtcaggctggtcttgagctcccgacctcaggtgayccgcccgcctcggcctctcaaagtgctgggattacaggcgtgagccactgcgcctggccagggatttctttcaggaacaaagatgttcagcactgcctcttttgttctttaacatgctgagctacaatattatgattgcttggcttggtaatgttgctgtgtgccagggaaatttctaataggaaaggtcattctggtgtcagatttttaggcttttcagctgtaggtaacatgaaataaccaaagggagaccgtgaaggtttaaaggtaagtcgatttgccagmgtggtaggggtagcaattggcgtttagagtgtttaaatccaggaaacactgaccctactaaaggtgcracctaccagatttaaaaatcaccaggagaaaatcagtgaatgtggtgcttgtggatccacaggagggcattacgcctcccacctcttccctctgtcaggtttttcctccctgttgcttactgtcttctcagctgtactgaaactgacatttgatttaggaacccagagagcgtggtcctctgaagacccagatattgctctctctgaaactcaaaaggatgaaacaaaagcctgaactagtttaacgctaaatattacattggtgcaaaagtaattgtgggtttttgacaagtaatggcaaaaaccgcagttacttttgcaccaatctaatataaaataagcaaatactaatggtttaaggctatttccttttatattttatttattttttttcactggttacctataaagactttgacagctgtgaccttttctactttatgtgaagcatcaagatggaaatagagaaaaaaagtaccaaaccctattatatatctctgagtaccccactcccacttcatgctaaaaagcagaatagggactcagcagttggttcttgatgtaatggagagtccgaaggaacaagggtctggrtgttagagtcattcttgggccaagtgccaggcaggaatctggtgagctacactctagcccatgcagccttgctgtctccaggatttgggggtgagtgaggagcccaggcaaacagtccaccaagaggtactcaactctgtgctgagatagggatgggctcaaggtagacatcagaatgagggagaagcagggaactggcactagaggagacaggattataatctctgggcaatggagataatattctaactcagaaaataataaaactcttagcagactctttttaaaaaaaatttttttttaatcagaaaattcagtaactgcaacaattcttgagcattattttcctgtaattgaaatgttcattatttggttaaaatttcagaaatgacacacctagggtttattacagcatctgattgcaaggccataactgtgaacacattttgttgttgactaagatactttcgaagttggtttattttggctttctcttacttacttgtgaactaattgctaaatgtgatttgtctcagagccttttagtgttgtgttctttagaaggaaatgtttccattgcaaacaagactaaaaagcctatcttcaacacacacacacataaaataatcctctacctccttattttggaatggatgattttaatcagtcatcttttttaatgctatgctgggacctctgttatattttgaaaacaacctgcccyatgcacactgagctggcctttcctttcacttctcaaactatcagtttcactagcaatcccttttggggcaaaactatcagtgagttttgctcaattttccaaattaggtttggtaacgtggtgtttcatcagtgatgctgggttgactgtgcctaagggagcctttgttttccctcttgtaagttgaggggagtaaagacatgagtgatagtggaattcaagagctgccacctaatttatcatccatgtactgttggatgtggaaaggatgggagaatggaagctagacaggaggtttgtaggggctggattgtaagggccttggattccatcctaatgagttttcttattctgatacttcacaaacatttttctatttctacttctaacagctgaggagactgaacttttaccataagagggaatttctttgaaatctccctatagggaatattttccctcttgtatgttgaagggagaagtaggttgagtagtgtcccccttcaaattcgtgtccacttggaacctcagaatgtgacctttaatagcaatagggtctttgcagatataattaacataagaattcagatgagatcatcttgaatatttagggtgagtcctaaagccaacgcctggtgtccttacaagtagaggagcagacacagagagacatgcagggaataaggccatgtaaggatgggggcggaggctggagtgatgatgccagaagccaaggagtgccagcagtcacctggagctggaaaggcaaggaaggattttcccccagagcctttggagagagcatggccctgctgaaaccttgattttggacttctggcctccacaactgtgagagaataaagttctgctgtttttaagccaacaaattatggtaatctgtcactgtaaccctaggaaactaatacaagaaggggcttcctgaagttagagtgggctggctccttgctgctccaggggaactggcaggaactgatgggattctgttccaggaggatgtgaggcactaagtagactggcaaggcagagacatatgggcatagggcaatatgactgggatccagtgactacacaatggtatggagtgggkacttctaccttggggaagctgaggcaggttgatgactagtcatttagatttagtagttgtatcgaagatggagaattagctacaacatggctggtaaccaggtagaacatatgatcttayggcctgactttctcaaaatcataaatgtagttgacgctttgtgcaggatgttagttttattatcaattttggcacagttagatggcaagatgcagagtttattgaccrtcagtccaggttttgaactaatagaatgattcaggaccctctttcttcattcctttaacaaccgacattggagggtgmctctgcttgagaggccatggacttctgtagttgtggatgcaaaaagagatgagccctggtgtttgggcttgggacaggcatgttatctgtcctggggaaacagtgagaggaacaggcagtggagtccttagcatgcactggcaagagcactgcctctgttgtcatttttttcattcctgcatcccagtgargcatctaaggttaacaatctgaaaaatgagggataatatgacccacctattaggttatttgaaagattaaatgagataatcmttttaaartatctactgtaatacatagtacatagtaaaagctcaataaatgttagaatgttagctgttagtatggttattgtatcctaatacattatgacaacagtgagaatgaaaatgaaaagttcagsctgggcatggtgtctcacgcctgtaatcccagcattttgggaggctgaggtgggtggattacctgaggtcaggaattcgagaccaggcgggccaacatggtgaaactctgtctccactaaaaatacaaaaattagacaggcatggtggcaggtgcctgtaatcccagctactcgggaggccgaggcaggagaattgcttgaacccgggaggtggaggttgcaatgagcagagatcataccattgcactctagcctgggtgacaagaatgaaactctatctcaaaaaaaaaaaaaaaaaagaaaaagaaaaaaaagaaaatggaaagttcctatcctgtctggaaaagactgattgttctgtggccacagtgacaagtgaccagtaaccatcagaatgtattgttttgtacctgtttaactgggtcaataacaacttgctctggcaatcatttgtgcttttgtaagctagccagtcagttgcttytgaaagctagccaacaccacacacagttgtaaagccagacaattggcaacagctaaactctagtgcacatgcccaggcaagtcagccagtcagcaacattctcactccagctttacttctgcagctaaaggtcaactaatgcctaaacattccagcttctggaagtctgccagtgcctgcactctaagggtctccaagccctatagaagatcagctctctctgctttgctcagggagaatgcctctgaaaatacagttcttccttgctaatttagcaagcagtgaattcagttttttgttcagatattgggtagagacctctttcttcaatgatagaattacaaataaagtgctaaaagatcacaaaaaagagggctatatggaaaagttcacacaagagatgatttttggctcaagtagtaaaatgggagttatttaagtagagaaaattccaggaggagggaggttttctaagctgagggaacacactgtgagtgaagacatgagtgatagtggaactcaagagctgccacctaatttgtcatccgtgaactgtaggatgtggaaaggatggggtgatggaagatagacaggaagtttgtagaggctggattgtaagggccttggattccatcctaatgagttttcttattctggtgctttgcaaacgtttttctatttctaagttctaacagctgaggagactgaacttttaccataagagggagtttctttgaaatctccctatagargatatttgtcattctattttggctgccaagcatctgaactctgttcttgcacttggagaatttcccattggagggagaaaagcagaatgctttgttcactataaaagctgaaaaggccactatttgtttttccagcctccctttcagctaggacatgggcacaactggggtgataccagtcagaagtacacaccctaatcttggcttgagagaagaagccaagaagtcagctctaggagtggaagtgaatgcagcaagaaatgagatctgagccgtgagcagtggtcatagtggtggtgcccattgttgagtgcatggtgtgaacattacacactgcagaattgacctcttttcatccatcctaagattcacatatttccaacactttaatatcactgaagtcaggatgctccttataaacaatgctgtatagaagctgataagcagcattatgtttttcttaaaaaataaaaaacaataatattagggtcagtgtcattgaagatttagaatgcagaagagtctgcattagggtggcagaagagtccatgttggattatttttgagcacaattttactgtgctctttgcctagtagtcccttgtctggttttccaaccatttaagttattctgtaagcttcttaataaattcatcctttggttaagttacttagagtttgtttctattgtttgaagctaagaaccctgactggtatatgcttgtcatctgaagaagtcatgagcatgctgtagtttattaaaatatctgctttgattcaaaaaagcttttctctctaaatcatcacttaaatttgatgtcccaggatactatgtcatgttaatgatttatgctaataactcattcaaaaatatttattgagtctctgtatgtgagattacggagaatgagtcctatgagagagtggccttcatggagcttttattgcattgggcttaccttcccctgcagagcattcctgctattcctatcccctgtggacttgaccccaggtaaacaaacacaatgtaggccatagaaagctgatagacacttgaacttagggaagtgatgttactgcatctgttgttagggactggtcctttcttcagttattctcaacatcattcacctggtgaaattttgtctgcctccagggatttcctgtatcttgaagctgtatggaaattagtttgaggagtggcgctggtagggggtggggtagcctttgggttagagacatggggtatctattggccaagctgcaaatgcctttgggttcaatgttctaggtattaagcttttcctttattccagataattgctatgtatcaaattaaagacttcctcaaagtgaatggtgctaaaattaatatttgggtctcgtaggtccttaggcttttcccaagtccacataaaaacttgccatgtgttacctttacgtagaatattcaattcagtctgaatgtattgtctgatcttattgcatagaaggaagcatgctttctaaagggagatcacctctgggggaatatattctacttgtggctgaagagtctgattaaagacttagcaataaacagccctaatgactgttagttgggaaattagacatagaggctatttgagcagcctttgataaaatgaaagttggccactgtagagtttgtcctgctttatgctaacattgtagctagagaccttttaagaggagctaatattttgcacctttgtggaacctcattccccaaatctagcaccttgggtattactgaaggtatactggagtattactgtttatctaacattaaagtcttttttaaattattattatactttaagttttagggtacatgtgcccaacgtgcaggttagttacatatatatacatgtgccatgttggtgtgctgcacctgttaactcgtcatttaacattaggtatatctcctaatgctatccctccccccaccccacaacaggccccggtgtgtgatgttccccttcctgtgtccatgtgttctcattgttcaattcccacctatgagtaagaacatgcagtgtttggtttttttgtccttgcgatagtttgctgagaatgatggtttccagcttcatccatgtccctacaaaggacatgaactcatccttttttatggctgcacagyattccatggtgtatatgtggcacgttttcttaatccagtctatcattgttggacatttggcttggttccaaktctttgctattatgaatagtgctgcaataaacatacgtgtgcatgtgtctttatagcagcatgatttataatcctttgggtatatacccagtaagttttgacatatttgaattaccattaacatgcaagtgagtcctaggcattcacaagatatcactattttcaaaatgtctattctctttagatatcttagaataattttcttgtcaggatttgctttattatagttgttaatttgtttttagtttgagatagcaccatacataatattccatttcctccttatttttatcccagtttttaaaagtttcttaaattggtttgcatgaargtgaaatccatgtcagcatttctggtttctgatacaatactattttcctttctcatttcccctgccatctcttgtctctctcaaaagaaaaaaaacaaaacaaaatacagaaccatgcattcattgtaagatgggagagctctgatgcttccacaatgtctttaaaaggggaatgctggaatgacatgattctcctttgttaactgttccacattttgtcagaacagttggacttgctctaaaatcctcaatgactagttcagcagaaggaaaggcagagacgtcccttgttgatacaagaatataaggagagcctagtgttgaaagctgtggcattagtgcagcagctttagtagctgaagtaatatttgtgatggtaaatttggatttttctcatgactgctttggaaatagaaaaataatttgattcttgctaaactaaataaaacaaacaagggagcttgagaaatgaaacactgagggatatttgaaagcaaagaataacagacatactttaataatttcagaaaataacatggtagagattccgtatcaacaggctgtttgccttctcagcccccaaaaaaggaataaaaggtgggcttttcccaggaaggtagtgctggcttttaagtaaaaggattttaaaacttatttttatttatttaatttttttgagatggaatcttgctctgtcacccaggctggagtgcagtggagtgattttggctcactgcaaactccctctcacaggttcaagcaactctcctgcctcagcctcctgagtagctgggactactggcatgtgccaccgtgcccggctaattttttgtatttttagtagagacggggtttcaccatgttggccaggctggtctcaaactcctgaactcaggtgatctgcatgcctcggcctctcaaagtgcaagtaagaggtatttaagggatcttaaacctcagctcagagggagatgatttaaaatatacatattttcttaattcatattaaaatcacagaaattaagcctggcatggtaacgtatgcctgtagtcccggctgttttggaggctgaaggaggaggatcacttgtgcccagaagttggagagtccagcctaggcaacatagcaagaccttgtytcttaccaataaatgaataaataaataaataaataaataagtgacaacaataacaaaatactccccagaaattagcatttcctatttttaatatcatagtaaccctttgaagccaaaataattcacttgcttctatactagacctaacaggccatgtggctgagaagtgaggacagacttgacaaaggggctttcttgtcatacctctgctctgtgcataggaataagttctagcagaaaggcttaagcttgtggtgccatattcataggtgctgactcactgctccagttgttccatttaaccatgatttttgattgcttgcttttgaaaattgtattcccttattaaagtttaacacaagtagaacataaggaacagaggcacctattttaaagaacaagacagaagtcatactattgagtgtacttttactaatatttaatgtttcttttattgtcttgccctgattttccttatggagttaaaattctttagcatttcattgcattatgaaacaagtgggtcaggcaatgagcttccttcttgaagattccatgacaacccactctgcattttcttcctatttctctttcttggtcttctctgcagtatcctttccatctgcctgtcccttaaatgttttaaaatgaaatattcttattttagattataaaagcaacacatactcattaaacaattcaagcaattaagtaatgtataaattaacatatcccacataaaaaaaccataactgcacagtaataatacacacacacacacacatatatatacaaacatattgatctacccctccacctctctctgtgggttcttactatatatacattattttgcagcttgagttttgatttaacaatataccatcagtgctgtaaatattggcattcctcagggttttctcccaagttttctcttccctctctgcctactctgaattgtgttacctsacttgtggttttggtcaccctcctgatcattctcaaatatgtattgccagccctagtctgtctctaagattccagctcctctatttatcattgcctacttagatgctgcatgggtccttcatacccaactctccatgaacactgtttctcttcctgtgtccatctcatggaacagcaatagctttcaccacattttcccacttagagakttggcatcaccatctgtccttctttttcattcaaccacatcctgtcaatcaccaggtctattttttctatctctttaatatctttttagctaatttgttattctccatactgcctaccacctctgtcatccaagtgacagtcatctcttgcttgggatgctctacctttctaactatccttccttctttgattcctcctcttcaccttctaatccatttgccacacaagcccaagaagatttattccagtgcaaatctgaacatgccttacttataatattcagtggcttgccattgccaatggaataaagcccaaactcttcaagactagtaggtcttcatacttagaggtttcacatgatctggcttctgcctgtccctcacctacctggttgttcaccatccccacctttgactctcactctaaaaatagtcacccatccggagttccttgaacattccatgctctcacttacacatgtttgccttgatacattctgcctccgcctcatgctgtttcctccagttgatgttcatttatcctttaggccacttcagtgatacttctctcaagaactaggcttggtgtcattcctatatgttctcaaagcatcwcacactttgtccttatcctattgtagcattgatcatactatacttcaattgcctgtttatagtttgtgtcttgccacctcttccatcccccaccaccattgccactgctaacttgactgtgagctccctgagggcaggaactaggaagagcacagaatgtagcccctgatagggaccaaatatttgaatgatgaatgtatgtcatcagaaaaccaagaatcccataaagctgcagagatgaccagtttgtgaatcctaggagttacagtggtcaagtctaggacatctcattagctgtgagggatcaggctggttctaaggtcagggtaggtrtatttcggggctcaggcatggtagttacagatactagtgctatgagggagtgaagcaatgtgatcataatcagaaactatttgccttttgctttccttcatgctttttgctgtttggagccttctgtagtcttagcaatgtgttgyaattggagagttggagacctgtgcaaggcctaactcctcagtggggcaggagaaatgcaaggattcctagagaggggtagctagattttggttagctgattgtcaaaatactcaaggcagctatcttacatctcacaactggtaaatcctgcctccctgcctccaatctctagctcattagagagaagactaggtttttatgaatctccctcacttcagagtccctgagtcctttaacccacatgctagagaggagaaaaaacaaatactagtgaaaactcgcatgcctcatgactctcttttttactcttgtgtatactccattgattttacatttgaataccacccaccccagctgttacattttaactgtgactgtattcacattgacttgcatgggatatttctcagttctatagtaaatgtgggtggttagaatatataatggaragaactctgggtttgggtttaggagactggagttaggaactgggtgctctagctcagtcatgtgatctggtgtggtcctattttatacaatttttaattaagtattgaatataaagtattaaatcacttttaaggcaaacaactcgaattaatgcaattcctcccaaatcgatcaagaactgtatatcaaagctgtttgggcctattgaattataagctgtattgattttattcaaatatttccacactagctggtgaatggaaatactcaatatccgctgtcatgagaatagtcttaaaatacacaaatgtcagtcagactctgcaaggtcttcagaaaggcacctcatgtataaaaggcaatctttctggcctcagtaagtcatctgccttttcttcacttcatttttctcactggggaaaactgggggactaaaacctacctcctagtaaatgagaaaatgtacatagaaggtgcctagtttagtacctgctacagagcaagcgctcagtgaatgttattagatttggaaaatatatatgatatgatagacagcataattgaatgtctgttttctactagaaagtcttacaacaaagcagtaaactgggtaatacatattacagcttaaaaaaatagaatcagtccaggcgcagttgcttacgactgtaatctcagcattttgggggccaaggcaggtggatcacctgaggtcaggagttccagaccagactggccaacctggtgaaaaytcatctctactaaaaatacaaaaattagctgggcatggtggtgggacctgtaatcccagctattcaggaggctgaggcaggagaatcgcttgaacctgggacgcagaatttgcagtgagtcgagatcgtatcattgcgctccagcctgagtgacagagcaagattctgtctcaaaaaaaaaaaaaaaaccagaaagaaagaaaaaaagaaaaaaaaatggaatcagaggacatcctacttcatggatataygtggattttgagcctatgcctgcgttttcccatgatttattttatttctttgttgaaataatgagtaagatggccagaaatgttttaaaaatagatctgaaraaactgctctcttggttccctatttcttaaagggccagaaaattttaaataatagacacacatttttgaaaggaaatttaaatcaactcgtacaggacgctctttaccctagttacgacatgaatgtaatagtccaatagcttcttttatccgggtataaacatctttaaagttccccaattattcagaaggacatcaagtcactttcacagatatgtgaaggttaaraaaaaagggactcttgggtgatgtargatagggtagatttacaacactttctcttgttcaccttaagaactgaaaatataagattttccaaattatagtgctatcagatatattaatcatgtcttaattagagattttgggaaatactctcataaatgcaaggcattaacaatagagtgattaagctacagaaccatttaatttaaaatttaatccagtagttgaagaaaataaagttttatcaatttggggagagtggacacagagaaaacctcaagtatgagaagatgaacatttgatgttttgattgaccacatcctggagggaagatatacaggatgtgtacatccttgaggcccaaagatacatttctgactttcagacagagaagatgggcaagatctgggattagaatggtgggattagaatggaatattgttttgttttgttttgttttgtttttcttgatggccatggatttgtacaaataaaggaacttggaagggcctgaagcaatggccatgccatttgatcaaaactagatgatctcaagtgctacaagagtcagctgaactcactaaaattgcaatgagaacaaaatatcatatttcaccattctggtttaggggcagctaatttttccttaactaagtttgagttttgagcctcttgagttaatagctttccttttgttatcatgcacactctcctagcctctgtacctggatgagataaatagcctaaattatgtttgcttcatggacagctttcttatgaactatctcagaatgtagtmartttgatggtccctgcatttggcagagaaccaacaaatcaccccactgaggtggacttgggacatactaggggtgaggtggagggtagatgaagatggctgggaacaggaaaagatgtgggatgccttttcttccaggtgcccatctgggctacgcttggccaggtggcagaaagaccaagcatggagcagaggattttggcttcttccctcagtccccttggtcagtttggatctgaccatttgacagacacattaacacagaagtaaaaagttagaatctgctctcttacccttcagtctgtgtcaaacagtagattttaaagttctttgggggcaagaatgtcttattcacttctctataaccctctcaactataaaagtgcttggtatataatagtggggtttttttaggtaaaaatatatcttatttatttcagaatacataccctactttaatgttctacaatttttgagcygaatgttacagccgattctaaacagagtgatgaagcttaaatgggcaaaggtaatcaaatgtgttatttatttcctttcttgatgttgtcaccttttttggkkggggggtggggacaaaatgttaactctcaatctttyacaaatatgttatttactctaaggactttctttggcagccctagttaaccttcaccaggtggtggagtccaactggagcagagaaatgggcttaccaaggaagtaagccttggcttctcatgcatctggctaaatctcttatagaggcaaatacatttgattgagtactactattcttgttttgtactctttcctttataactttatgaataaatgacagctggcagcacaagacctttgaaagctactgttctattaattcaataagatgatatccccatttcttctgtcttctttctttaagagaaaacatgaaattattttttaaagctggtcaactaaggcttgggttttcctcccctattccctgtaaggtacttgggtcgggacgtcttgtgttgttacatgccaggctgtcctgggcatgctctgtcgttccttaatgccaatgcacacatctgttcaaaatttcacctttctcatttttgaacgtttcttaaaattgatggatgcatttaatgtggcattatttttttcctaaaagacttatgtaatcaaaccaatgatggtttataattgatgatatcttagaatacaggaaaggtaatgtgttttagttatctattgttgcataacaaataaccacaaaacttaaaattgcaataatcatatattatctttcatggtttctgagggtcaggaactcacctagggcagactagagaggtctgtgtctgcttcaggctgtctggggtatcagctagaagacttaaagcctagaaattagaagcatctgaaggctcattgattcccatgtgagctttgctggggctatttgcccataggtgatcmttccataaggagataatggagtggaaggaactaaactaaaaatctttattccttttcttatgagtgaaatattttccaagatcataaggatctctggaaggaagaataaactcggtgttttctaagaaaggctgtacttgggtttctgatctgaggggggcttatagatcagaactttcatgatctaacttttggcattgggaagggcagcctgtcatgacaatcacacatacmtatcacatcagagcctgttccattcatcagtattcaggatgatttgtaccagactccttacttagtcttccccaattctccataccatcttgaggtttgaaattcttggtggggaaaagaaacataggtgacagtgccactcttttccccatttgaatcagggacttgatagtcagctgtgtccaaatactccttatcttcccattttagagaagagttcttctcttgcagtcctttgagatctctgatctaagcatattaaggaggcactttctctaaagttcttgttattcatatctaagatacatcctagggccaagggaatccaacagtgtttggcctctctaacccttctcaacttttgaagattcaaagagttagataaaatactattttcaaaaaaaaaatcaaacagtactctttcctaaaaggataaggttttaataaaatgggcatttttgatttaaaccttttagagttcagaggggccatttcttaatgcctacatatattgaggcttctaaatataatatttaaaataatattgctattagtatagaaatgtgaaataagcattccaccacaaaaataagttttcttttgctgaactcatttgggttaattctgcaaggattaactgagcactaggttcagaatattgagctttaagaaaatttttataaaagcaatattgttatcagtagtagttcatatctgctgtgtgcctccaattggcaggcacttgtggaattgatggtattattctcattttacagaaaaggaaactgagcccagataacttatgtaatttggccaaggtcatacactgagcaagtagcaagcagaattctgtctcacgtgaaaaccattgtgtgagagartttgaccagtattttggtagctgtagaatttttctcaagcaactacgaagtctaggggactagtgcatactaatggaaacttttcatgtggagtgtcttcttatctgaagctggaggcttcaaagaattaaagagaggatcttgatagggctaattattttctttcccacagctctgcccagctgttcccattttaccccttttgtatgaaggcattcatatgattttgttgtagaggcttgtgatratgacttcttggcaaaaagcctcaccatgtttttctagtgtgctggaaacatgatttctaagacacctgacacattgacacttgtactgacttcaacccacacccttaatagaggagctgggtctctattgtgaccataatatattgcagcagaagacccaaattcactgcattgcttgaataatttgcctgtatgatggtagccacctggagctactgaatttctcgcagatttttgttttagtatctcatttattaggttaaagaagggctattttattctaaagaaagtttttcaattagaggtttgacatggctcaaagatgatagtagtggaactgttggatatatataaatcttttatttttgctatgtatgcatgtctttgtgttgaatccagattagttttagttttggtgtgtttattgtgtttattctgtagagtgtttagcactctggagtttttctaagttaatgagcaattgcatcatggataacccacattgtggtttctttagatgcaatgtggccaatggcaatagtgtgtgtgtatgagggggtggtggcaggatgaggggagagatatcaaggactcttgagatctggaattcataaaaatgatttgttctttagtttttagatgaacttaaatttttctyttattatagaaataatgtttattgtagaaaacttagaaaatatatatgggctcccaaaaataaataaacatgatgtctcagaattagtcacagttaagattttggttcaacttattccaatctcrtgtgtgtggggtgtgtgtgtgtgtgtgtgagtatgtgtgaacattcatacatatgtttattcttgcataaataagcctatagtataaatattcttctatgaattatcttttcagatgtatctattcatcmaatattcttccatgacatcatttttaatgtctgtaaaattcttgttatatggctataccatatcttttggacataagatttattattatgatttttgtctttattctgtaatcttgcagcaactgactgatagaagcttttaaaattttggaccagtgaattggctcccttcccacactacaatcagcagaatgtgttatgcattgctgcttccctgccccgagacccacttccagcataataatgctatggaactgattgctgttgacagctcatctacttttgctctttcttcttgcaggagacagagcatgtggtatccagccagtcagagtgtcaggtgagagcaggaacaccagctcatgagagtccacaaaacaatgccttcaagtgccaagaaacagtgcgacttcaaccaaggtgggccctttgttatcagaagctattctgtgcttgtggttcctttctcagaaatgcyractgtgtgcttgccactcccacacaagaggcaaggctttctgacttttgctggcattccttatagtcagaaaagctgcttaaaggggcctagaagaggaatcgctgagtgagtttaagataaatgtaaatgacctactttctctgtcttccatttgaaaataatctaccttaaggctcagggggaagtggagacaggtcctgcccttggagaggaatgctgatttcatctattcttattctttattctatgctagagggaattagattttcctttgtgatagtgataaatttgtgatgaccatgtaggcaccatagcaactgatttttacgtagtctctcatttagccttctctactttctcgtaaagctgtgtactcatagtctgaaacatattaaggcacttgcctgatgttgcacaagtgaaaaggactgagccagaatttgaacccacaaatgtctgattgcagcatggcaggtgcakattctgtgctgacccgagtgtcttccagtgaccttagccctgacatagccccaggatggcctctctagcctgctagacctgctggagacagccctggatccagggcaaggatgtgggtggaaagcagcctgcagaaaggttggcatgacattctgatgggagcctggcattgcagctgtctatggaaagtctcttctggaaataaacagaagaaagaattcaaccgctagttgtgtcagctgtctttgtaggatcttgtgtacagtgtaatcatagccctcactcagtggaaagggagggctgtgcttctgagcctgacctttagaattgtttttctaaggcagcacagtctaaatcaacaactacagagaagattggctgtgctatgcagttgtacttttaaatatccaatgtactaaatttagaataatagaacctcaaaaggttggaggggacctcaaaggtaaggtgcttccctatccaggcagattcatgggcaccttttataaccctcttcacaagctgacttcttttatgtgtttactcttacctgacctcaggtaatacctgttggattcagccttgtaatttctccagtaatcaggacattctccctcctctttgaggtattattgtaagaaagctattttttggctactggaatcaatttagtcagtggcccaccagcctgatgactgtctctctcagaaagaagaaagtcaactattattcccatgcatatttcaaaataatataaaagcaaaacaaaacaaataaaaaccaaaaaaaagtcattcatgcttgtgtatggaatgtatggtggtcctgtaggggtagatatttaacagagaccaacaggggaaaatgrcgttagcaattaaccttctcaaagatgcttgatgttcagtaaacttaaaaccattgtgtatcccattttgtatttctcttcctctgcctcttagcaaaccttcataggatcctaaataccttgttgtctttttcgcctccccatctcccatctttcatgtcccactttcacagaattgagctttctgacctagcaacattccagactgttctgtgcaccgctgtcagcaatcgcaggatctggtgataagtcacatatcaggagtgctgtgaggrcagttatgtctagtactcttagttaagtaacctttaaactacagttatttatcacaaccatggtgacatcaccaagggacattctaatggaactttaaaaaaatccatctcaaaatattacagggattgtgaaatttgatgaactagtgaaatgagatccgaggctaaaaacaactttgaatcaggtagctcacattcctgataaccttcctcttctgttttaagcaggcgtctggccaggtttggacatatcatgccaaatagaatcttgatagagacatgatactgtaatgggacactccagacctaggtctggttcagagtgaaagaataagccaggctaagtctcagcagktgtaaaataccaccttctttggggcagtgggctggggagaatgctattaatataatgaacactgtaagaaaaggaagaaagatctctctgtagcaagaggccaccttactccttggggtcacacatcattttggtgagactcgaaggagtagtcagtcttcagaaaatgaatccatgtttgtagaggtgagattttggagcggattgaggtcatgagatgggcattgatcttttcacgaatgccaaataatttcatacctacagctctcagagtcctcatgttgtataytgggctcttttgagcacaaggagcctttatgtatttatgaggatgagactcaggaaggtctatgaatgtgtttgcccaagtttctgtgtatatatactctattattgctactgtaataactgaccacaaacttgtggctttaaacacaaatttattatctcatagttctgtaggatagaagtcctacatatgtctccctgggccaaaaaaaaaaaaaaaaaaaaaaaaaaargtgttggcagggctccattcctttctagaggctctagggaagaatctatccatttccataccttttccagtttccagaggctgcccacattccatggcttatggtcccttcctccattttcaagccaccaacattgcatctctctgatcattcttccgtagtcacatctccctctgatcatggctgggaaacattttttgattttaaggattcatgtgaatagattgggctcactcagataatttccctatctcgaggtccttaattacattttcacagtcctttttgtcacataaggtaaggtggcagaggagcgacaatgatgaagacatggacatctttggggagctattattctgtccactacatgtatgtttatttttttctagtgaaaatctctaaaacatgtatcagactctcatatggcacatataaccccagaaaatatttagaaaccctgtcctaatgtctttctacctccaagttcgaaaacacatgactccagagaagattcagaactgttaaatcaaggttggcctaaagctgcctcattacatattttaagttcagcctaaaggtttctctgtacattgtgaactataacctaaatggagttgtatacaaactgtagcctacttttgtgccaattaccaagttgtggccaaaggtggccagctgttcaaaccatgttcaaataaggcaaacgccgagctgtaacgaatccggctgtttctgcacctcacttctattttctgtatgtcattttcctttttctgtccataactcttcttccaccatgtggctgtgctggagtctctgagcctactctgtctgggaaggctgcctgattcacgaattgttctttgctcaattaaacccttttaaatttaattcagctaaagattttcttttaacagaacccttgtcctaatgtctttctacttccaagctggcttgctcttctgatttcccttaacagagccaacctcagatacagttaaagccacttccatcttctttcactgcacccttcctcccatttgccatgccccacccttccctatattatattccttggccttacagtgccacacattagaggcctcaaatttggtgtcctacaggtgtatctggtgtggagacatatttggcttgtacaaagttaaactattttgaatcaacattttaaaatcaagagtttttacagatttttggctttctttggaagagtctaaaggagggataacccagggcctacattcctccaaggcaacaactagctggagctgaggagtagatttcaatttttttcacaattcctacccagctctcctcatttatttatgctctttgccaagcttctataggcatttgatttataatgcctgcttcaatccttttcttcctggcaactgctgctcctggggactctgtagctccctggagctaagtcctcctggatgaaaatgtcttatcatatggtgatggctgatattgtcttaatgccatcttttccccagatgacatgttttcattttaatatggacttccattgcatgagtggaagggttgggttattatactactctgcatactcctcaatacctggtattttcaaaacatgtaaaattaaagaactgcagttagttagagctggaagaaactttagtaatcatttaatacaactatctttttcttctttgacacccagtgaggctgtgatttgctcaagttctctcttcccttactaatagaaccaagattagtaccatcaatctgtatggagttgccacttaatgaatatgcattagtttgactgatttttaaagctaaagccgctgccaatcctgtaaaccctcagatatgacaaagggaaatttatgaatgtaagagaatattaatgcagttggggaattcttactaagctaagtaaatttacttttgagaatgattaactcacttatatttaaaatattgtattaaaatttatgacgacattaaacctttaatgttgttaaagaccttgtctgtgtaaacaggagttattctatagcattgtcttactgttaattaggttggtggttacattgtaagttccagttcattggcctcttcatccagattcccatgttgcaggaggttgaagatccttagcaaggataatggccttggatggcctccactattttttgacattccagatgaaagagaaagctgtgggctttgttgctttatagaaagaggaagttttgttggcagcaacttttctatgggggataaatcctttcatcttttgtttttgagatagacaatgtgtgtgtgtgtgtgtgtgtgtgtgtgtgtgtgtgtgtgtgtgtgtttgaatagctaattgtttcttacttaaatgtttttcatagacgtaagcagagtcttaatgagttctgctaaacagagacagaatgaataagagaatgagcactgagatttttagtattaataatacaaaagacatatctcccttcttggactgtacctgatctctgcatatttctaggatcttcttctccttcctcattagtgtgctcctagggttttgttttgtttcttttaaaaggggagcagggatgaggtagagataaaaaacagcttgccttcacagtgctttgagactccctggtatacggttggataatgagtgggtattgacctagttcatgttgagtatcccacatagaaagggagctggaaaggagggctctccttcactgcccacacccactgcctccctccgtggatgcagaaacaacctggtggaaggaaagaacattcaaatgaagagatccagggtcttatctcacatctctcaggtgaccatggtcatttcactcaaatttctgggccccctcctctaacataaggaatttgggtcaaatgatttctggagcttcttctggctctaacattgaaaatgctcaacactctagatatttaaaacattagacatgggaaggctatagctaaagaatacgagctcctgaagatacagataaaaataattccccctcccctgctgtagagcacaaaaatcccacacccagtcygtraactgctgattgaaaaaagagctcacacttgattattttggaaatgaaattttccttttttgttgtttttttaaaggagattacccttggtcatttgataaattgttagcactttcactgataatttggcataaggataaaagggaaacttagaaacattctctcattcaaaatgctactactaccactactactaataatcaaataagtgaaacactggaaaatatagagaatcccaaggatgtaaaaatgacttgttatcttacctccgagatataaccactattaccatggtaaggcactttcttatattgttgctattgttttaacgttataaagagaaattgtgtatgaaaggggcttctggatgcattgggctttaaatctgctagaacacatggacacaggaaggggaacatcacactctggggactgttgtggggtgggggaaggggggagggatagcattaggagatatacctaacgctaaatgacgagttaatgggtgyagcacaccagcatggcacatgtatacatatgtaactaacctgcacattgtgcacawgtaccctaaaacttaaagtataataataataaaagaaaaaaaaagaagcactatttacatcaagcagatcatagaatagaaagctagacaagaatgcattatgattatacaataatcatgtatagcagtgtgcttttctacataagaccagtaagatgagtaataagcagtaggttaattatcacaaggttggtgagttcatttatggctaaattgaacaaatttaattttccatagcaaatattctaacatacaatttctataagaaacatgttttgcaagctttggtatcattatagccctttgttagaaatgatatttctaggagaccaaacaggaaactttgtccttaacatctgaacatcttggaaagtttcttggcttaacataaaataggtttaagagaaatttcaataatgattataggagacagagaatgtataaatttaaacctaatttagaactttgaccagctggttaagtgttcagtgtgcctgaggcgactagaatggggctaatctttaacttactcttcagcttcccaatgaagtcgtggctactcccatatttctgttatagttatttgtcaatgaggtattccttttcaagatttacattaaatactacacacacacacacacacacacacacmcattatgtatagtgacatacacatacacacagagctcctactcaaccctccatatgtattttttcttatattattaatgctaggttaaaacatttttgggattagatagatagatgtatacatacatacacatatttataaatttgtctctaagaatatattatacataattacattgctttatgttacattatattatacattgctgtatattacattgtgttatacataattatattacattgctatgtaacttgtttgtcctgcttaatattctcttttccatatcataaaatacactataacatacgtaatggctgtaaaatacagtcatgtaccacataataacatttcagttaacaacggacatgtatgatggtggtcctataagattaaaataccatatttttrctgtacctttgtatgtttagatatgcaaataccactgtattacagttgtctacagtattcagtacagtaacatgctgtagaggtttgcagcctagaaacattagactataccatatagcctaggtgtgtagtgggctataccatctaggtttctgtaagtacactctgtggtgtttgcacaacaacgaaatagcctaaggatgcatttctcaaaatacatccccgtcactaagggatacatgactctatttccttttgtggatataccatcatttatgtaatgaaatctaaagtatttgatattgcagttacttataggatttatatttgtatttattgctgtagtaaacatcttaaaaacaatatctttatgtgcatccattatagttttcttggtttgtgcttaaaagtcaaagttgtctaggcataggatttggagtagctaactgtaatgaaacttaagatataaatttttagccaggcacactgagattacagttcatgcctgtaatctcagcactttgggagcctgaggcgggcagatcacttgaggccaggagtttgagaccagcctggccaacatggtgaaaccccatctgtactaaaaataaaatacaaaaattagctgggcacggtggcacacacctgtaatcccagctgcttgggaggctgagacatgagaatctcttgaacctgggaggcagaggttgcagtgagctgrgatcatgccactgcactgcagcctggatgactgagtgagaccttgttaaaagaaaaaaagagatatacaattttcagttgtccgatcatggaagaagataggaatataatacacaactagtaactttgagagaactagataaaagtcatgtggctggatttctgtatgtgttggaatcataggatggtggctctgggtggaatgttggagacaatccagtttaatctcttccccttccttgtgtatttactagatatttctgtttcatccactagccttcatggtgttctagttcacattgtgctaagggcaaagtgcttctggctctagcattcccagaggacatttggaagtcatgtgggggatggaaaaattctttgttgtgtgggatgcctcattcatgtcagggactctgacacctttggctctagcccacagaatgccagtagacaactccagcttctgtaataatcacaaatagcccccagattttctacatggcccctaggggacataccatcaccctgtaaaaacacaaaaacamaaaaaamcccactaaatttcatgatagataccttatctaaaaccatgttttatgtgagtctttattaacatggggacatgatctaagtggaaaaaagcagttacataacagtatcacaagatgttcttatttttgcttaatatataattatttacagaaacatatactagcaagacagaaatccatattttagtggtggtaattttggggggagatgaattacaggtgattaaaaaaatattttttgtgcttttactttccaagtttccctgctagcgatcccctattaagcttgtaattggcagaaagtgataagtttatattatttgcaagacaaataatagtacctactgtttctctggctttatttatttagtaacaattgaatcttactttgggacagacatgactattagcagaatattaggagagaacagatttattttttatttttgttaactgggaaaacttaaaatgaattttcagtgacacttacagcctttgtggtttaggtcacttgggatcagaaaccaaatactacagatgattttataggtttaaataatgtttaaagccataatttgtatcatagatgcctcttttcttcagcatttgcctcagtagaaagtctcttcttatactcttgagcagcatgccaagcctctcaggggtccagtagcacagaattcttatcaagagcactctgatgatcctgcagatgcagggacaagggaaatatcaagacccatttaagtgggggtggggtccaaggggagaaagattgagaaggggtagatgcaggaataagacagctgttgaagtcttcttagtgccttaagtttagcaccaacacaagaaaacagttttggccaaacccagcctattgaataaatctaaaaacacattaatagagcccctgggaagggcctaggaaatatccaagatactgtagtgtaaagaggaaaggccttggcagtatgcagacctggatgctagttccagctttgttgcttccttggacagattccctaacctctctgggctttgatttcttcagatgtgtgatggaaatgaaaatatctacttcccagagctactgtcgcaaggattaaatgaactgcatgttcagcttcattcagggtctggcccacagcaggggctcggaagattaatgttgctattccataagagaggagatccttcctccatgaaggtttttgcttagctccacagtattgatctatggcttgccaatacatctatcttgctgctagtgttctctcttctctccaccatttatctaaattttaatctcatctcagagcccagctctctcccagcttttcatgcaccttctcctttctcaatagcccatgttgatctctgtagttagaacatgttcaatgtaactagacacatggtactagtattaaaagagtttggtttatctcttcaaataggatatatgcctattttctgtaattcttttgactgtgcagttttcagcacagtgctgaactcataggttcagtagtttagtaaagtttctgcttattgattcttagataagcaatcccatggaattctggtttgccctcyataatctcacgcctctcttggccatatttcattatggtcctttatgtacctggtcctttacaagctctagtttgcttttgtgtacactggctaaattcttgtgcttccatatccatcctgcacagagcccaggttaccttcatagatctgtttttctgcacatctttaagctagaccttagcttccctctagttgaaccaaaaactatgcataccttggacaagttggtttcccaactcaatctcaactgaattgccagttgagattccagtgatttggactcgcttgctcaacttggacatgtgattcagacaatttcaaaaaggtttttaaaggggttgtacatgacaaagtggycctagttggccatgaatagtcatggttggaaaagtggggatcaagaaagtggtcattttcaatgtgtaattactgccagtcttgctgatcttgctcgtgtgcaacaaaggagacccaggctattgcatgacaagtggttgtttcttggtaatgtagttggtattctctgcaaacaatggaaactaactgtgtttgattcaggcaaggaaaggaatctaaatgaaggctattgcttagcttaaaaaattgaactaagggcaaatatgctttgggaaggataagaaccaggcctagtccatggatttctggaatcacaatgacagggacatgtttctctgaggtgttatcactggatgatcccacgctaatacaacagcttttcattccccctcaagttttgacttcagggagaaaggaactaactggcctagttcaggccacatgtttaccctttcatgtagaattgtggaaagctagtttcccaagggaaagggaggttgatgtcagaagaagtggattggagatgaaaaatgctgaacagatgaaatcagtatagtgttgggtgacatgggggcatgggaagaacctggagctgatggagcaagaggactaagaaccaattttaagggtcagaaaggcttggtgtggcttgccaaacttaactgagtcaaagacatggaaagaccagggctcctccaacttgcctccctgatcattaactcacccttgctcctcagaccgacactgatccaggttctgttcatcttgtgtcaagtcgcatcagcaaagacaagtaaagctggagtgtgctgaactgcagagagaatgtaccagatgatgtcagaaaagttggtggtggacacgctgcatggggcctggtagcctgggtgttgatccttggattttgtctaagtctagaagaaaaccactggaggttataaacaggagtgacagactcagattgacattaaacgatcactctgggtactgtgtgttgtacactatactgtagtgtgttgtactcaggggtacatcttggaagctaatatatcatccctgtgggaggtgctggtgacaatgaagatggagggaagatgacaggtgaaggatagagactcatgactctttccttttgggagagaaagaaaatcttgaatagggaacaggcagcatttaggcttgattaatattaatgcctactcaaatcccctgtgccttgaaaaatattcttgtgttccaagagctaacctgattgatactttaaaagttaaagtgttgcaagtctgagtatcagttgtaatatcacagaagccagtgtgatacgtagttacaaatattcatcagctattcacctgtcrtttaaattccgcacccccaccccccagcccatcacttgtgacactctgtgcccttcactgcatctgtccctgatctaaatcttcatttgtgtgatgaggtttttctctttcccccaactgtaagctccaaaagacagagattgtgtcgactttgtcaccgctttcttacttgaggttcctcttgaaggtggattctgatagataggaggagctgggtacaggaaggtggtcccaggaagcaggatctagggaaggaggaagagcccacaacaggtgtgttacttggtaggttgccactctgagcaactggggtctctctgaggaactgtgtaggcagtatctcagacttatccctctgaaagttgaggaaagggctgcagcatttattcacacacacacaccccaccttctcttccggctgcgggctgctcccaggggagttaaatctgccacacatgcaggctgagggaatgagccctgtctggcaaaaaactttgaggcagaagaatgaagaaacttggcagaggcttgaggtgggcagaagtgtccttggagctgaagtattggttacaaccactcgtctcctgggctgagcactgcctggcacatggagcaggtgtctgatcattgtttactaagtgtatggaatgtatttactaagtgtatggaatgaatgaggtgatgaaagcaaagtgccttgtagcctgctcagcaaaccaggtgctgctataattattactcctaataatgtcttattggggcctctgctctcactcattcacctgctggatcctgtgtcctcaatattccatccaaaatgtgttctttatggttcacagtgtcttttaaaccacacccatgtctactttacctccactctgccaattctgaagctggccctgtgcacctgactcactgctcacccattctctgggcattgctgtggtcttggctgcttctggtgtctgttccagctcaccaaagtgagaagtggtaccttttccaggacagctgggctgccctgtatttgaagtttttcatggtgttttgaggggcacagcctttctctctttgggaatgtgttccctgggggaccaggccagaaacaccatgtcactcctatactcaaagaagttcctcccttgcacgttttagccactggtgtcctcccaggctgttgcacttggacctttaggatagcgttccccaattaggaatcccctagagtgcttcttaactatatgtcatcatcctacttttctggaaattctgattaagtaggtttgggttgtggcccaggaatctctgttttaataatactggctgattctaatcttcagagaagtacaaggtgggaggtggtggttggggaagttggcttctgggagggtataccattggggatcagtgttctgtttctagctgaagcatccttgggagttcattggcctggacaagtggatacatgggttgggaagtcagtttctgaacatccatggacttcgagttttgttttctttcagtagtctctcggggaataattttgaacactgtggcttggtttttttttagtctttgaagttggctgcttaatatttgacctcagtcctttagcagacatttggtaagaaccaataagagaatgtcttcaatgtggcttcgactctctagagaaaggaactttctatttactggtattaagggctgttattgtttctaataatattactggaatttattggcatcttgtctgtgtctgcatatagagctattgtttgtatataaaacatgttttgctcagagggttgtcctcttgggatataccttttgttttcaaaagagtttcaggaaacaccagtcatacagccagccagcagtcatccgggtatacattagtgtatcccaagtattgccttctcatagagaggctcaattttttatgcagtggaatatcctgaattctgaagatgtgatgggagtcagcactgctcagttctaaggctctgattctatgtgaagtattctgaaaagtgtgttggatgctctctttttactctttctgcccaggttttctaggtcatgggttcaaaagctactaattaatctttcatagatctcttcagggaagaaatgcatttgttatgggaatgagagtcattccatcctctaggctctgctagcatgctataggtggaagagggagcatcagttatcattactttacacactcagaaatatataagaattggcagctgcccataaccctaggatgaatacgttatttacaaacatatgagtgcctactgtgtgtcatatgccagacttggccctagagataaaatgctaagcaaggctgctatggtccttgctccacagtgctcaccatcgtgagaaagaaacaatcaaataattacacaaatacatgattaagaactgagacctgctgcatagcagaaagtagaagatcagaatacagtgagaacatatataagaaagggagacctgactgggagctatctagcatctaaagtatgaatgagttacttaggagagaaagtggagagggaacagcattacaggcacatgtgaaggcctgcgctggaaaggagcatggtgcatccacaaaacggaaagaatgccagtgtagctggagttcagagagggagaatgatgcaagctaaggttgargagtgggcacatactaaatccttcagggtgtcatacagtactctcggaattttgagttttattttaagtatagtgtgcagaagggtagtgaaagatcttgtgtgaacggtggcctgaggagggtagaggggaagtagggagaccagggagaaactactgtcattcaggtagttcagatgagaggtgctggtggcttggccccagatggcagtggtagagatagaggggaggggacagacacaaacatgatttgggataagaaattgagaggcttgttaataacttggttattgggcttaagggaaagaaaagcgttagatagctgtccgttgtcttccatgagccattggcaagatggggaagcttttcactgaaataggaaacactttcctctgctaatttaattatagatagttcaaacattggtgtaaatatacaactgtgagctaaaatgtggcgttttcacaaattatcacatcctgcagtttgacactgtccttaggccaagaaaaatatcttaatgcttagttgggtttattgttttgaactccagtacacctcctgcgaggaggccactagaagatgaccctacaggctgactcagcacgagctttagggttccagcaaagtgggaacatcaaacatttttagaaaagttgtatttcagtgggctatccacaagtttgtagtcataggctatccacaagtttgcagtttgaatccagggaaaagctcttttcatatcagcacaaaattaagttttgcatttctctgttgagaagtattttttactttgaattatacagtggtggcagcagtggcaatggtggtgctggtggtggtgatggtgatgctggttggtggtgctggtggtggtgatggtgrtgstggttggtggtgstggtggkggtgatgatgggggtgatgctggtgggtggtgggtgatgatgggggtgatgctggtgggtggtggcagtggtggtggcaatggtagtggcagtggtggtagtgatggtggcaatggtgatggtgatggtgatgatggtgattgtggaggtgatggcagtggttgtggtggttgtggtgatggtggtggtaatggtggtggtggtagtggtggtggtgggtgatgatgttggtgaatggtggtgatagtcatggtggtagtagtggtggtgatggttggagatatcacatgctcatcactactgagggccataattgggctctgaggagtgcaggctgcatttctcattgccaggacctgggctagaggacaagyttacactggagttagcacagtactatgactggctgactcattttggtcccctttaaaagcatgcatttgatatatatttgcttagttactttcctattattgttttggacacaggcggcaagagaattggagggagtgttcagtgtgaccgagtttttgtgtgtaggccagcttccaggaaagattgtaaatggttcaagcagtatcgttaaggatcttaaaaagaagggagtttgagatggctagctactgttccagttctccatcattcattgctaaactccagtgaaaagcttcatttatttttcctcttctactatgacctttatctttttcagtccagtggccttttcttttctcgccttctgtttctcatgatctctaggagactttgacactttgtagcagtgtgagcttgggccattctcctgcatgtcctgttcttcttgccttgctttctttttctccataatacttagcatctggtgcaccatagataatcactggtttatttctttttgttmtccttccgtgagaatataagttccacaagggcagactttattttatccactgctttgttcccaacacctgcaacagtacctagcacatctttggtgtttaaaaaatatttgttgactgaatggatgaagtatttaactaccctttctcctattaggtgaaatagatataataatgctagtctcatatgatgaccttgatgattaaataaaataatgtaagtaaactgcctggaagacccactctggggtagtaagggctggtgaattgaagtcattcttgggtctagtgctttctctcatttatccatctcttgaaaacatacatactgagaagcttctaggtackttgcctagcacataacgaagcaaaaagtgatgcagaatctgcccacatgaccttatctgtggccactgtacaccatcataattatctcaccccccttctctgctgaacacacttagagtgccccattccagggtgaaccctggccagacatttttacttctctatttcagtctcacctcaagcttcaaatatctaaatctgaactcatgaattgcctctcttyatgaaagacattacatgtttttctggcttcattaaaaaaaaagaaacctgccattttccttgtcacacagactcaagtttgtaataattttgattaccgcatctctttcactccatactttgaatccacacccaagacttcttgattgcttttatccttgaaaaatgtcttttatctgtctctaactctccagtttctcacmaccattattcttttttgtttgtttgttttagagatggagttttgcctgtcacccaggctagagtgcagtggcacgatctcagctcactgcaaactccgcctcccggttcaagcaattctcctgcctcagcctcctgagtagctgggattacaggtgcacaccgccatacctggctatcttttgtattttagtagagatggggtttcactgtgttgcccaggctggtstcgaactcctgagctcaggcaatccacctgccttggcctccctaaatgctaggattgcaggcatgagacacaacgcccggcctctcacctccattctaacgtcaacccttttgccctgatgcttgatttgctgaagtggcttcaagactcagtgttcattagctttatcatcatttaagtttcactagattctaagtctccttaaggcactgcctctgattgtctattattgtttccacaacactggaccaggcacacagtagacattcagatggttagtaaattaaagtacctttgatgctctagactacagttctcaaacttgttctggaggtttatctaatggttaagagtagtttccttggaagatcatgtgagtatattctacgtaggctcttctctatatctcactaatatatamcatatatttttaacaaagtatatttctgcttccttccatgaaagtttgctacttggttatttgttttaccatctgctgtcactcatcaacagggagcttgcaccaaagccctagaaaaacttgtatttgaagagtgtaaaccagtaaatattttttctattagagaataccactcttccattttgctggtgctactctatagaaacatagtttgagaactactgagggttacaaagaaactaygagccattcaaagtgttagatgttactgagtagggtggattaacccctgtctccaagactgcttttgcctgttttgtgggaaagagctattttgtattttctgatgcactgaaatcactgtttgtggttcaggggattgatggatattagatgtgtgagccagcagtcttcctcctcaccctctttttccccttgagctatctaagcctgagcttgtggttgggagccttaggctctctcccacccaggagggaaatgctggtttgttcaggcatggaggacattagtctgaccttcacaattttcttctattaccatctccttaacttttctcattagaaattgtttgcacagtaagcaaagcttgtagagtaaaaaaaaaattgtattcttaagaatattttaaagaagttaggctcctggcatttctaaatgtgcattatgacatttagatattgaccttgttgcccatttagaggacatatatgctttcttcaggatgcaaattggagcagaatagtaactgtaaataattaggtccccaaagaaatctttttataaatgttaacactgacaaatctcttattcattaagataactggcctttttataaggataataactataagttaatatgtttattatataatagcattcagactgtctcagaaaaacttgaattctatttaacagatgacattggaccatagaatttgacaaattatgatttggacctaaggatctttcaacagtggagttttgtgtattttgtttttgtttgtaagctacagaaaatgactttgagtagatatgctttaaattcattttcttctgttgtcagtcatgtagtggcaaaacccagcttcgccatgtgtcttagtccatttagtgttgctattgcagaatacctgaggcttcataatttgtaaggaaaagaaatttatttggctcacaataatggtcactgaaaaggctaagattgggtggctgcacctggtgtggccctcaggctgcttctcccatggcaaaaagcaaaggggagttggcttgaacagagatcacatggtgagagaggaagcaagagagtgaaaccaaggaagccagactcttttcaacaagctgttctctagggaacaaatgccctccctttcccttcccctccccctccccctcccccgccccctccccttcccctttccttcccttcccttcccttcccttcccttcccttcccttcccttcccttccctctttttatttattttaagttcagggtacaagtgcaggcttgtttcacaggtaaacttgtgtcatgcgggtttgttgtacagattatttaatcacccaggtattaagcctagtacccattagttattttttcctgatcctctccctcctcccacctgccaccctctgaaaggccccagtgtgtgttgtccccctctatgtgtctcatagattgatgtgttctcatcatttagctcccacttataagtgaaaatatgcggtatttggttttcactcaaaattataaaaaccctggaagacaaactaggcaatatgatttaggacacaggcctagacaaagatttcatgacagtgatgccaaaagcagttgcaacaatagcaaaaattgacagatgggatctaattaaatgaaagagcatatgcatagcaaaagaacttattgacagagtaaacaggcaatctacagaatgggaaaaaatttttgcaaactacccatccctcaaaggtctgatatccagcatctataaggaacttaaacaaatctacaagaaaaaaaccaagcaacctcataaaagaagtaggcaaaggacatgaacagacacttttctgtttttttgagactgagtctcactccrtcgctcaggctggagtgcagtgacgcaatctcagcttattgcaacctccgcctcccaggttcaagcaattctcgtgcctcagcctcccaagtagctgggactacaggtgcctgccaccacgccccactaatttttgtacttttagtagagacagggtttcaccatattgcccaggctggtctcaaactcctgacctagtgacctgcatgcctcagcctcccaaagtgctgggattacaggcatgagccaccgcgcctggccgaacagacactttaaaagaagacatacatggagccaacaaacaaatgaaaaaaagctcacatcactgatcattagagaaatgcaaatcaaaaccacaatgggaacaaatttatttctgagtaagagctcacttccttatccctcccctgtcacagatcccatgacccaaacccctcccactaggccccacctcccaacactgccacactggggatcaaatttcaacatgagttttggtgggaacaaaccacatccaaaccattgcaccatggtacccagcatatattataacatttattgtgtaagttaagagataggatgaaatttccataagctgtcttcagcagacaaatggtatctttctgcaactgtatcagatcacattcattcaatcaaaacaattattgaatttttaataggtgaggttttagcagtatagaaaataaacataatcaatacctccttggagcktacactttactgtggacatgcaaataaatgtataatttcaataggaggaagtgctaagaagaaaatgtacaggactgtatgctagagagtgagggtgagggcatgtcttgtctagttagggaggcctccttggggaggtgccctgtgagctgagccgatgcatacatggtgataagagtgaattgtatgcagatcccaggggagagcagtctgggctcaggcacagcaagtgtgaaggtttgaacagggagcaagcactacctgttcaaggaacagagagaaggccagggtggctggagtgtggtgaacaagggtgagagtggtaggagaggggaccagggaggctgtcagggttcaagtgctataatgtgctgcaggccattgtaaggagtctgtattttattctacaggcagtgggacacaaccaagggtttttatcaggggtacagccagatttgtagccaccagcttcacatgtacatcactgaaacgtttcttttaaatggaaataatttttctttgtattttatagaatagaccagaggactgccatttcgccaaaggatgcttttgaaactcggcaggacttaaatgaggtacgtgcaatcattactggttrtaagaacatgaattagccaatcatgagatttactattctttttcacagtactaggaattcattctcatgaaaacttagtatttttgcttttaagtgaacttgtaatacttatagttctttgttcaattggtaatgtttttcctttttccggarcaaacatttaaaatactgtttgtgaggtggcttgcgatgtcttggccctaacccaagtccagcagtcattttgttacactcttttcagctttgcttcaggattgtataaccgtggcgatgacagttaacatttgcaaaattttctcttaattttattttgtctacatctctgtttttcctaacagcttctgcaatttcaaacataatcatacttactgtttatccactaagaatgatatagtttagtgtttgcaatgtgattttcttagtagacttcaagacgtgaagccgtattttccaatccaaatcatttcccaccaaactggacatcatgatgttaattagcttgttctggattttctttggaatatgtaattgaattctcctgtatgaaattaatgtaatataattatgatatctattataatgaatgccattgtttaagacattggtttggaatactctctctggctcttcttgtcctcattgtaaattaagtagtagtaggtggtatttagtacgtctgattaaggtcatagcaaagagaatgaaaagacctgatgatcagatgccaaaaagagaaatgatgggctttacgcaaattgtttatttgaygttttgaagatgcatcccttcctcctcttcctctcccaccccacaaaaagggtatttcacttaatttaggtgattttatttttcttttctttctttttggtagaacttggtagaaataaatagctaaaggtaaaccagctgcttggttaagccaagttaaatagctaaagtggtaaaaagtgtcctaaagataagaacacagaattgttatttttgtgtgtgtgcatacagacaggctccaaattctacaatcttcctcayagtagtgagtgaaaaagagyttaagagaaaagaggcaagagcctgaatcagtgaacgcagctgtctgccccactgtgaacaagcaaaatgctagttgtaaaggagcaaagctttgttttgacataagtgactagaaaaatgaggtgattgtaagagtcaactcatgataactttcaagtatttgggagaaactgttttttgagctgcaaatccatgggaatgctgagatcacttgaacattcccaaatctcagttgtgaaaagctatatttgaaaacctgcttttctgtattccttcactacattgtgtttgcaaatgacatgaagtgtgccagctcactgcgctgattgcctgagcataagagcactggatggagaagtccatctgaaacagcaggcatcgccatattttaaacgtgtgcayttccatacagaggtgacgctgctgatccagactggttgaatacagtatgtgctgacagtgtttttttttccatcagggggtgaactatatagattgacccacattctttcacacagtttctgttatggccaaaatttgggagaccagaaaagaccttggggaaacttgaaggacgtgcaatatgaatgggacagagatcatcaaagagggtggatgtgttcacactcatggattgaaatgtcctgtatcattcccrgcatttctcaacttattgaacaccaaactcttttatggaagaaccacctaataacatttctttaggcgacagagtctctatggaacacaaatgggaaacattgctatatttttaatggggatagaaaatacatacagaaaagtgcacaggtcataggtatacagctgaatgaattcttacaaagtgtgcaaccagcacataaatcaagaaacaaaatattaccagcatcccagatgcctctttgtaattccttccagtcgctactctcctatgaagataactagtattttttagtgttttattcatggattacatatgctcttttgtgtctggcttcgtttgctccatattatattcatgagggtcattcatgtttggtatatagtcatagttttcatttgccttgctgtaactcattgtatacttgtttctggttgttgaccagagctgctgttatctttcatatatatctttattactatgagctgttttctagcctctttgtacagctgactttttacaggagtatgcctcccatctctaaataaacatgtaaggtagaactttttgttatgttagctctcttcattggtttttgttcctttattttatttattcaccacctccccacacatccttataaagaacctaccagttccataactgcactctcttccataccaacttgcgagtctaaaaccaaaaaagagtttcttgagcctcatgagaatcatggtccaaaagtgttttccagatgtttccatatgttgtacgtagtaataattacaagatgctacctacgtaccttatacattccccaaattttacatctggtatttcacttctactatttgtacttctttgtccacttgctctgtgactgacagatggggctcagcttgattccagagctggcacttgacccgaggtcttctctgcctggcacagtgatacatggtgtagcgtatccatgtatgttgtctctgtgtgtgtttctcatactttcctagtgggcygaagagctcactaacttcttgtttccacttggcatgagtatagatttgacacctgccagtctcatttttcttctgccagcctagagctcccagtttttgactttgagtctcttgataggaattgcattttttattccacattttttgktgtctctgggactagagtataggagttttttccagaaaaaaactgattaaatctccctactgacattcacctgagctgtatgactctgtctcggtaagacatcagattttgggggttaggatcttttgaatcctgactggaaaatattctagacttgagatctgtcagtgtctcatccaccttaatccttggtcttagtcagtctgccagtccatgtaatcataagcattcaatagatcagaaaggtacttgaaagataaaatgaagaacaatgattgtttttactctctgtatgcttgtagatcacattccttgcttcagtcccaattaagaaaaataacatatttataaagaaaacgaataaatctctccttccctgaaaaaaaaaaaaagccatattgggtcctcaaactactgtttccaactcccagactatatatgaaagagcaccacatcaacttcttttagtttcctttgtaaactaaaactactgagaaaaaaattggtagactcaacagtgagggtcaaaaggggatgataatcttttcttcccaccttgcttccgcatttctaactctgtaggaagttttgaattgggctaactctaggtgtcctttcagagattttttttaagtttaattagatttttaaatgacaaataataattgtacatttgtatatatttatgggatacaatgtgatgttttgatatattatggaatgaacaaatcaggcaaatttgcatattcaacactttgaatatgtatcagttctttgtgatgagaacatttaaaatcctctatttcagctaatatacaatatattattattaattatagtcactgtgtggtgcaataaaccaccaraactgatttatcctttctaactgaaactttatacccattcactaatgtctcccctttccctgtccacctccttcctccccaccagcctctggtaaccctattttactctctactaaaagtttggcttttttagattccacttataagtgagatcttayagtattgaggcctttcaattttaacattcattgattctacccttcttccattttcccagtgcttgcagagtgtagccatagcttcccatcagggatggaataaggaaaaccaagtaactcatggttaaggcctcctcctggccaacccaccatctgaagcctagtttggggagtgaatagtaagtagtgcaatagcagtgacatatatgcttagcatagttatttatcagtctcacaygagagacaggccacattattgtacgtgaagaattgtgatcaactggggatctggagtggtatggctggagcagactgaagctctgggtcaccatgggccttcttttcttctttattatactcacccaacccaactcttatgtcatcatcatacagaaggaagttatcacctcaaaaactgttcacggcctctgtgctcaggaaaaacactttattttcttatctgatagatactttgaaggtattctgcatttaccttttggataaaacaatgtcagttgagtgaatatgagtttgtttacattttacttcttacctggaatttcaaggccatataggtaaggtcagccacaagccaattgaccttgaaggagaagctttggtggccttacatggattccttatttcccttgtctttgaggcttattggccatgaaactctcttgtgctggcattgaccatcactatcgtttatcctctccaggcctaagatgccagcttataaatctgaaaaaaataaaacaatcttctcatgggttaatgggtttacccaagagagatgtgttgagcacaaagaagcagatgctaaataatcctggaatgcaaaaatggataaatgttgcatgagtcttttgcacaccagtaaactctatacctccaatggcgrggatttcaaggtagctaagacttaaggcatcartgggagaaatacttctaggtggatatactgacttttttttttgtccccagagtaaaaccatagagacaggtgtctgtctcccccaggtatgtttcccacatggtaaggagtctaagtgggatgactcactgtaggaacatagaaaaatctaaaaccttaataaaattaggaggacagaataagttcagttgcagggagtgaatgagatagaggggatggggactgtgtttagaaggtttgagatccttgaagtttattgcaacttgctgaggcagccagccatagtgaagtggaaggaaccctggaactgagggggttgaggaattatgaagccagacaatagcatgattgtcagcctggacmttgaagtaactgaatgtcaggggccactgatggagaggaagaaaccaacccagatggaagtcgctgagtcctataatattcaggtcatggaataggaaaggatggtgttgtcttttgtaggggagaagaaattggtagactcaacagtgagggtcaaaaggggatgataatctattcatcccaccttgcttccccatttctaactgtgaggtagagagtaggaaagagaaatgatttttgaaggtggagaaatttcagtcacattgttacttcataaggaatgttaacaccgtcacactggctaagccatttcacctggtaactagcagaacctaaaacatctgaaaaaggcaagcacaagttctctgatactgcattgtgctccctttatgagtgctttgtccatttatgcccaaggttgcaatgttttgaatttttgcaatcagaccttggcaatgactttgagcagtaggatataaataactcccacatgcttcgcgttccaataatggaacactaggcataaatgggttagagtgagaggataatagcatctctttaatggaaagaatattactgtaactctattctgaagactccattttgagtgctctttgtgtttatagaataaggtagaaatatttttgctgttaattgaccctacagggcattctaaaggtatgttctgcctctgttgttgctttgaaatttagtattgactttatcaaaaatagccaggagatttccagatttgtgtgtgtcctcatcactctcattggttactggggaaccagaggaagagaagatgctcacaatgagcatggattcagacttgtgttatattctgactgtggttctaccaaaagaggataaattccttaggaataccattagaatctagaggaagaggctatcttataagaaacaaatgtaataaattactagcatgcaacagatgttcaataatgacctaatatcaatattaagaagtttaaccttggatctataattgcagtcttattctacaaaggagatacctatttttatttagcttggtataaaagagatgatttatttacctgaaatcaatatgaaaaattaatttttcttcccatactactgttaactcttatctgttcaattatgctggtcataataactaaactttagcctcaatgtcaaagatatcgatgaagaatcctttaataygttaattttgttaaaagtaggacaatttgcacacatgcagtgtccctctttgagtcggtatgcatgtgtctatgcctctgtgtatctccatgtgaaggactagattgtgtttttattgcatccacagtttatcatataggtattttggcatcaaaccatgtcaagcctcaagatggtacttattgttttgttcaggatgtgtttcttcctcaaaattgtgttaattttgtgaaaatggtctaggaagaggcttcctaggcctttaacattcttgagctgactgaatggtattatttctgtaagaataggcagctctatttttctattcaaatgcaaacccagtctatagggttaggccttagtttgggattgagtgagggtgttttaaaaagtatctgtgattctttcggtgtgactgaaagtcaattcaacttggttttaataagaacaggatgttattgacatatagcagaaaacttaggatcaggataggctctatgcatggctaggtccagggattgaaaactcatcactggagatgccatctatttctatctctgggttcttctttttctatattggcttcatctttatttaggtcagcccctttttagggacaaattatttagtaattccagtgtatattagttttctattaatgggtaataaattaccaagagcttagtggctttaaacatttatttattagcttacagttatgtaggtcagaaatgtgggtggactcaactgggttttctgcttagggtttcatgaaattgaaatctaggcactggctggggtagtttcttatctggaggttctggagaaaagcccccgtcccagcttcttcaggtcattgcctgaatttagttccttgtagttgtgcaactgtgtgtcctgcttccttgctgggtgtcacctgagggcagctctcagcttctagaggctgtcacactccccctcctcaccctttatcttggagccagcaacagcrtggcaaatccttcttgtgctttgaatttctataatgttgtcttttgctaccaactggaagaaactctgtgcattttaaaggcctccccgattggtccaggctcagccaagtaatctgtatctttggtcagctaagttaaagctttaattacatttgcaaatctcttcatagaagtacctagattagtgtttgattatgttatcaggatattaggattctgcctaccacacagtgaaataagagtctctccttcccagttctaaaaagtcccatacttcagtctgatttatctggcttggggcatgtgcccatttctgaaccagttcctgtgatgttggtgtttggaataagctgatttgttagacttgggccatatttcccacttaggatctaggagtgctattctcagaagataagtaattagatgctgcataatgttggtctctggaagcatgatctccaaggtaattttcctctctgctggacccctgcaggatgccacttagcatttttctggtatggctttctgagttgaggtagagtcaccttgctcccctaccaaggtttgttcctcagctggagcagtatcctatgattcatttaattttagacaacttttgttatcagtgtcaatgaggacatcccgtagccaacatgttcacggtgtgaatactagttctcattcccagctgaatgaactgcatggcaaaaaagttctgaatggcttccaggcctgctttattctgccccattgttcagatgcaggtatctagcctgctttcttatttccagggaaaccaggtctgtgagcctcaccctcaggggaatccttagtgtggtgttggcagaaaaagtggaagccatgccagcagctgcctctatttttccttgtctgggaactgccttggagaagcatcagaggtgttgggctgagcagaggcattgaggcaggacttgcctagttgacccacctgtgctgccttttgcctggcagcctacccatctccccagctcctctgtccctttgtcccattggctcctcctgttttctctggcatgacatcttgatcctttttcttgttgctcattctttcatgtatatctcttcatactactaatttcctactctctcatgtaaggctggaaggaactgtgtccagttcagtggctcccggggccagcctgtgctgtagtttttattgctttttggcaaaagtataaacgtaagagcaatgaatatagtgagtttttttataaagtccatgaacaacctttcacttagaaattgttcttaaaattttcattttgtgaggaaatgatggggaggggatttgtttgttttctttcttacatgctctcacttggtgaaatacaaagttgacagctttcataaatatattctgttccccctacccctgctaacttttagaaaatattactgctgaactgaagaccaaatttttcctgagagctgtgacctttgaaatgttttcttctaagggtaattctttctttcaacaggatttattgagaagcaaatgtgtatccagctttgggtctggtacaggggtgaggtgaaacagctgcagtacaagagtggactttgytgtcctcacttcccagaggtttacagggacacatatcaagtcgggacatctggccttcctagccttggcacctattgtcttttttaggacatttttggccttctgaaggttataaaactcaagtttatagagagacaagagctgaattttcttattttcttacaaaatattagtatttgacwacctaagtgtctatcaacagacaaatggataaagaaaatatggtacttatatacaatggaatattatccagtcataaaaaagagtgaaatattgtcatttacagcaacatgggtgatcctggagaaaattatattaaatgaaataagccagtcacagaaagataaacactgcatgttcttgctcatgtgtgaatgctaagaaagttgttcttggccgggcgcagtggctcacgcctgtaatcccagcactttgggaggccgaggcgggtggatcacgaggtcaggagatcgagaccatccaggctaacacggtgaaaccccgtctctactaaaaatacaaaaaaaaattagctgggcatggtggtgggcgcctgtagtcccagctactcgggaggctgaggcaggagaatggcgtgaacccaggaggtggagtttgcattgagctgagattgcaccactgcactccatcctgggcaacagaatgagactccgtctcaaaaaaaaaaaaaaaaaaaaaagaaaaagaaaaaatgttgatctcagaagtagagagtagaatagtggttactagatgctgggaagggtaagggggagagagagacagggagggattggttaaaggatataaaatcattgctagataagaggaataagttctagtattctacagcactgtagtgtgactctcgtcaataatgatttactacggattttcaaatagctaggagagaagattttgaatgttcccaacacaagcaaatggtaaatatttgaggtagtgaataatctcattattgtgatttgatcactatgtatgtatcaaaactcaccgtgtaccctgtaaatatgtataattattatgtgtcaattcaaaatttaaaaatatataacttaaaaattagtatttgaggaaatggccatgctttccaatgtgacctgccatctttaaaggcatagatatatgttatttcatatggcatgtgattttataattttcagtgaatacttactgatttctaataaatattcattgaattttagaaaacgaaggagttaaggtagtgttatcagaaaaagtagatggcctatgagccagcatcatttggtggtttgccctgtgacacagaatgagccagattaagggcccagtgggccatctcctgtgctaccatcttactaagtttagttttgaaggtgaatatttttcaggtctaaaataaatggaaacaaagccacaaagaaacaaccatatgggctacaacccagactagctttggasttcagcccttgggatttaattaatgttctgggaaaaatgactggttaggggcttatccaacttaagacctgtgcttttggataatttaagtactagtaactccattgagaaactattgaagttcattccatgagttgtaagtgagacacattgtattttcagaaaaatcagtcttattatctagaaaagctcagagttctactttaaattgggagtttataggtcaggcgcrgtggctcacacgtgtaatcccagcactttgggaggccaaggtgggcggaycacgaggtcaggagatagagaccatcctggctaatatggtgaaaccctgcctctactaaaaatataaaaaattcgccaggcgtgatggtgggcgcctgtagtcccagctactcaggaggctgaggcaggagaatggcgtgaacccaggaggtggagcttgcagtgagccgagatcacaccactgcactccagcctgggcgacagagcaagactccatctcaaaaaaaaaaaaaaaaaaagggagtttataaaatggtattattctctcccaaacatcttgttcttattgttcatttaataaagtgaacataacaaggatatcataatgaggtgaaatcaagtataggattccccctttccaggttgaagtcatttagcttaaaggaaatgtgggttttattattgtatattgtggctaggttgtccttgtttaaaaagaattgctgataggatccaaataagacctggattttcttgtcaacagaaggctccttaaagtgaatagcttgytctcctacattgaatttctcctttgggaggtggcggagagtgagggctgagctcctgaacagagggaagctggggcgggctgagctgaggtgtgctgtgctgcaaaccatgctcagacacaagtgacgctgtcctcagagggattcgccaaaagtccaatgtctttactttaggggagggataaatttggctttttcttgtaatggtcgacattgggagaagtcccactgtgttggcaagaacatccagaagttcaggaagcaataccttcttgcttctgagcacttcacactttatacctcctggtaggggtgggggcagctttcaagggaaccaaccgaaggataaaaaggcaatgagggagtcagagggctggggctcagagaaaagcttctggccctggggcaagtagagctaagtgggcaactgagatatttatagtgtgtcaaggccccagggaatagggcccttggacttcttgtgttgaaagaccctgcctcagacctactgaaccagaatctctggaatgggcacgtcctgggagtgcacgtcttttataaactcccctgtgatttttaagcactttaaggtttctaaaccagggcagcaggaggggtcaatattggatactcagagacccctgccccccctgcaaatactggctaaaggacccagaaagacaaaactcagatacaatggcagcctttttattggttggctcttttctacacattgcgctaggatgcagcagtaaacaatggaggtacggtgctagctctcatggagctgataaacaatacacaaaattacataatgtggcgagccttgtgaaggaaataaacaagatgctaaaagagacactagggggccccctgctgagataagataatcagaactggctcaataatttgatgggatcttggccgagaaacaactagagctgagtagggtctgaggaggagggggcagagagcaggtgaatcagcagatggaaaggaagggtgttgtatgtatgtgggtgggcatatattcaagaaacattgaaattcagggaagaagagtggtaagtagaaatggagacatttggagacccagtcatgtccccagttttgagcagatttccaacttgatttgcttcatatcatcatagggaatcatatgcaattcttggacagataaaaggatgggagaggaggactaaagcctttcatacgaactaaatgtaagctgtgcctgctctgggactggtgaattgcagacaaaggcaccttaaaatagtatttaaccatccagcctgtgtgggtgttctctatttcaacccaactaaagtgggacctgagtaattgtagaggagagaaaatgagtagagtattttctaaaacaagtagcatattctccattatgtaaatgggaaaaattagctttttaaagaaaaccacacctacgtttcacagacttctctctggcttctttcttaaccagatgggatagttggagcagcaggggtggtcattgttctttacagggtctgttagcccttactcaattttcctgcagattctagacattcgtttgaggagactttggatataaaccaggaaaagcactagcagtctggccctgagtgacgggcttggggaggcagggagagtggaagtcctatcagagagggctgggttgaggtggcactaggactgtaggggtttactaggacctggaatgaagggtccytcatctttctgtagagggaaaagcatgttcctgcattgaaggtcactaagtcgggcatgatggaagtgaaatgggtggttagtcactcactccctgggcttgctgtttctttcctccatagccctatgacaataataactgtcatgattttttgatttgtttacttgcttattagtgatctcccactagactggaagccccacgaggaaggggctgctaatagcctcatactgcagagcctagtgcagctcttgcatggaaagctgcctggctttccatgtggagctggatgtgtggcatcatgcctgcaaggtggacacgaactctgcacattcactgcaagctgtcctgaagccttcttggggtggctctgcagggcacagacctggtaggacagatcacccatccactggaaggacatgtatgtggcagtggtgtagatcaggggtctccaaccccagagccatggaccagtaccggcctgtagcctgttaggacctgggctgcacrgcccgagaagatgagcagtgggcagcgagctttactgcctgagctccgcctcctgtcagatcagtggtggcattagattctcaggagcatgcaccctattgtgaactgcgcatgcgaggaatctatgttgcgtgctccttttgaggatctaatgcctcatgatctgaggtggaacagtttcatcccaaaacaatccccgtgccccagtccatggaaaaattgtcttctgcaaagccggtccctggtgccaaaaaggttgggactgctagtgtagattactcatagacaaatctccccgtccccttgtcatgggttccttgatcctcagaacaagtatctcttcatggaccccatcccacacagtgtgtccaagtccccactctctgttcaggaggacttacaagtggcccatggtgccaaaaggcagactgtcctcaggtaatgggtcagtgaggggtgggaaggaatattactgaggacagctggtctgcagagtttcttcctctttgccttcttgtcctccatttataacagtttgttttcccttctacttggggatcttcttgtttctccagaccttcatcttttgtctcctattccatttgccacttaatttcttccctattactctaagtttagtcctatctaatagctgaagaaggaataaaccagccacacaactagatctcctttgacactcagagtcttgcttagtgtgagtacagtgagggagaaagtggcagaggaagatggatgagaacaaccgatggatgcttcttcttcttcttctttttccccctgttgcccagtctggagtgcaatggcatgatcttggctcactgcaccctccacctcctgggttcaagcaattctcatgcctctgccacccaagtagctgggattacaggagtgtgccaccatgcctggctaaagttttatatttttagtagagaaggggtttcaccatgttggctaggctggtcttgaactcctgacctcaaatgatccacccacctcggcctcccaaagtgctgggattataggcataagccactgcgcccagccaccaatggatagttctagccataactgggtcatggcattatacctctgttcctatgggagaccagggatctctgaatgtgaactcctgtgcagtgaaattctttgaaacctatttgtgttgtctggacatttggttccgttccaaacacagtgtctaagcacccactccatgccagattctgtgcatccatctccagtccatgtgcctgtttgcttttctctcctttaaagttgtaaggggacttagaagtcatgtagcctaagggccttgctaggcaggtgcagaaataagaccctggggggtaaagtgatgagtcaaggcctcagtgtcagtgtagtgtacagccttgccacatggccagagctctatccggcagcctttggggtttggagatagtcatactaaacacagaatccagtccttgtgtgtttgcaacatgctggtgctctgcaaagtgctttccagctttccatgatttcccttgtttaattctgagagcatcccttagagcaagtaccattgttgttgttaacactgcccctttatacagaggacattaaggcccagaataactaggatgcttggccaaagtcagacacatggtatgtagcaaagctgacattccctctcgttctgtgggaacctgaaagctatgccctcttctgctttgcagaatatacaagagcacttacaaatttgagacaggcagctggttctacaattaaaaaaaaaagaatgaaaggtaaagttaaagaaagaatgctagcctttctttttactttacctttcattcatttttaaaaattcttaaaatatatctaacctaaaatttaccatttaacttttttttttttttttttttttttttttgagacagagtctcactctgtcacccaggctagagtgcagtggcatgatctccactcactgcaacctccacctcctgggtacaagcaattgtcctgtctcagactcccgagtagctgggactactggcgcccccaaccatgcccggctaatttttgtattttcagtagagacaggatttcaccatattggtcaggctggtctcgaagtcctgacctcaagtgatcctcccacctctgcctcccaaagtgctgggattacaggcgtgagccaccacacctggcctttttttttttttttttttttgagatggagtctcgctctattgcccaggctggagtgcaatggtgcgatcttggctcactgcatcctccacctcctgggttcaagcgattctcctgtctcagcctcctaagtagctgggattacaggtgcgtgccaccacacccggttaattttggtattttttcgtagaaatagggtttcaccatgtcagtcaggctggtctcaaactcctgacctcaggtgatccaccgccttgacctcccaaagtgctgggattacaggtatgagccactgcaccctgccaccatttaaacatttttaagtgtgtagttcagtgacattaagtacagtcacactgttgggcaaccatcactaccatccatctccagaacttttttcatcttcccaatataaaactctgtacccattaaacaatagctcccatctcctccctatgtcccaccccccagcaccagctcttgataaccaccattctactttctgtatgatgaatatatatatatatatatatatatatatattwgagatggagtcttgctctgttgcccaggctgaagtgcagtggtacaatctcagctcactgcaaccccaaactcccgggttcaagcaattatcgtgcctcagtgtcctgagcagctgaaattacaggtgtgtgccaccatgcccagctaatttttatatttttagtatagacgaggtttccccatgttagccagcctggtctcaacctcctggcctcaagtgatccgcctgtctcagcctcccaaagtgctgggatttacaggcttaggccaccgcttccagcttcgatgaattttactactctaaatatcttatgcaagtgggagtatacagtagttatccttttgtgattggtttatttcacttagcataatgtcctcaaagtttatacatgttgtggcatgttgctgtgtcagaattccttccttttgaatgctgaacaatgttccattgtatgtgcataaccacgtttggtttatccattcatccgctcatggacacttgggctgtgtccaccttgtgttagtctgttagttcttccataacaaatatcagacttggaaacttaaacaacagaaatgtattttttcacagtcctgaagactggaagtctcagatcaaggtgccagcagggtcaatttctcctgagcctctctccttgtcttgcagacagctgccttctcacatggccttctttctgtctgtctccctggtattgcttcctcatctaaccctaactgcctctttaaaggggctgtctccaaatacagtatcattggggcttagggcttcaatgtataaattttgtagagacactattttatccaaaacataactcttggttattgtgagtaatgcagccatgagtgtgagtgtatgaatatctgttcaagtccctgcttccaattgttttggctagatatgcagcaatgaaattgctggattatatggtaattctatttttaatattttgggagcccatcattctgttttgcatagtggcagcaccattttgcattcccatggcattatttgttaatcttcagggtagttttgctctttttgagaggtcactgatttccaatgtccttcagtaggaaacttgcctagaatcttygtttgcctcccagctgcttgtttactaaatagtaaatcctcccagaaacttggtgtgcctgttccttcagcagctcctgtcaacaacctcagttcttgcttccacactcagctgctgggaaaacttcccagaatggaggaggaagccaaaaaaatggcccagtcccacacaggtgcttcacgtgagctatgggctcccagacagcagccgctgagctcttaggaggtttgcgccgggtcccaccccatctccaggcatggcagaggtgtgatcctgagcctgcctaggcacctgctcctttcagaatggtgaagagacaacagattttagacatcccttggtgggcagcttgtaaaacactactgtaggttcatactcacatcaacagaatggatcaagtggtgtgtgtgggactcgatcttgcatggaagggaggagttggggtgtgagagatgttggatagatgtctatgtgaggagaggtgtgaaggtgtgtatggagcaggtgtgtgtgtgtggacagtatgtgaaggcatgggaattggatgtgggtgtgtgtgrggtgggtgtgcatgggtatgtgtggagtaggctgggaggtttcgggggctggatgtgagggtatgaggtatgtgtggggtaagggtgtgtgtgtgkggaaggtggggtgtttttaggtgtggggagtagggatgagagtatgggggtttggtatgagcgtctgtgtggagtaggaggtgagggtaggtatgagagtgcatgtaggatggaggtgatcactaggggctgagggtgtacatacgtgtgtgtgtgtggagtagggggtgagggtgtgtatgtggcaggggtggggctgtggagtgggagtgacactgtgtgggggaaaggatatgcagagggtagggtgtgagtaggtgtgtgtgtgcctgtgtgtgttggagggtcctagcagggaaaggaccagtggctctgctccyggtgcccacccctgctggagctgggaggacagaagagcagctgagacctgcagaaccttctcgtggagagggagagagcctggccagggactcaggctgactcactttcacctggtcggaggaattaatttgctggcatctgcatcrtggcaggatgcatgcgtcaatctgtatgactttgttcttattaagaatcatgggagaaattttaaatgagaaatgaagagagtgggtgggaggttatgctgagggctatgaaagataaattgcttcttcctcagtggctaggttatgctaaatgaccaaggtcatctccctccacccttttctttcaccctgttctcatgtaagagaagtaactttagaagacacacacacacacacacacacataccccagcataccaatgtggactagggagcctcaaagcccctcccagatgccaggcagcctctgcagcagtaactctttgtgcactgcagtttgctgcagtctttgctttggagggatgatggcttttatgaacggtagccagggagggacctaatgtcttctgcttcctgatgtcagcacaatgaatgaaacactcaaagcgtaaagcctcaagcacccgggaagcagatatcttctcagattggttctccagatgcagcgtctcttgctgatgaaatcaccagtcccatgtgtcacagataatccatatacgttaggatttaaatgaggcagaaactsagcctgcatgtggaatgatgcgtatatgattctggcacaaccagttctttccctgaagcagctgttgccaccaccctcttcctgccaggcagtggaggaaggtgcttgcgggagctgcggacacactgttgtgtgttaggcatctacttagctggcctcatgttctgcttttgctggcagaattccttgctgaagctgcaagccctygaatctgatctgtgctctgcatttttaacaaaccaggaagaagctgctcaggtgcatggagtcaaggacccggcgccagcatcaacccagagcgtgcttgccgatgggacagattctgcaggtaagatacagggctgggggttgtcccaaattgtactctcaaggtagttcagtctcttgctggttcacactyagcctgagcccctgagggaaaacagtgcctggggcaacatgaaagcccaagaggtgcttctgagttgcccaggagttgctgagggggagcaggaaggattgggatttgctataacatagacctgtctagatgcggccaagagtcacacttacacaaatgggtgtcatttgtgtaaggtgaaagtacccatcacaacatctagtcttcattttcccatttggtctcctgggacaaatgagtgctatgcttattttatattactggacctagataacctgtgctgtcttgaaattcttctttttgatgtgttgaggatggggaagtttccatactgctacttcctttcctgttaactgcttgtaagatgatccatgcatgcagggaaagtgggggtgagtggtccactgacagctcattctgatcctgtattgtcttgtttggtttccatttttttttttcattaatttccttgtcaaaaagtcccaaattgagtctcaattttctgttagtctctggctttaattccrgggatggtagattggctagccaacagcaggcaaattaatgttcccaggaatatttggagaggaaagaaacactgatttatataagtgagagcacagcttatgttttctaacataacaaagaggtcacaagtttgcagactggtttccagataaatggtagaaataggcttagggagcattcttcatgaaaggtccttaatctctaggagttgaaggcaaagatttacacaggtaatctgtttcagtaccattagcaattgtacattttagatactcctgttgaaagcagaccccataaatatatacacctactatatgcccaaattaaaagtaaaaataaatgaacaatttaaacaaattttaaagaaaaaagaaagaaaacagacccacatagtctaagcaggtaaatcagtactctccagtgctggaatgtgtactaataatggtggcatataatagctactagtagtagctactatcattatttaaaacattctatgatcctggcactgttctaagcactttttgtgtattatattaaatacttaaactgacctgtgaagtactaccattcttcataagacactgaagcctagtatagcattgctggtgagtggtacattgtttccctatggatgcaggtggccagttggctgtctttgttgcccagtgagctctcctgctctgttggccattatgtttggatgagtggcaaataaaattgaacaggagccaacgtcaagccaattagcaatttcagtcagattatttagacaacatcccttttcttccctcaacaccagattccactccctgcaaacagacaacatatttaatacaaaacacataaagaagtctcaagccaagtacaagttaactgttgagttatttgatgatttggattaactawacaagtttctgacaaagtgttcagtaaaatatttgttgcatgttggatgtggatatattttttcttcttttcatcatgacttttatgtgtcttcccaacaattaagaatagttttggattttctaattcggcatgggcaagattttgtacaagcttattatcacttgttataaaatgaaaataaatacagggtttatgtagggattgctcacacggaggaactagcaatgcattccatgttaaatatcaaatggcagagatgtgcagaagtctctttagagaggaggcttgtgggttgcatgctggattttccaaaatgtagatgaatctgaaatgtctcagatctcccaagagagtctagaaaactagattgtagagacatctagaaaactgatgtttccagggacctaaggagtctcttcatttggcagggatattgccaaagtgacaggcagttgtaaggtgcctttgtgacttaaattatgggatggtttggtctcactgggttcttagatgcactcttacaggaagaccatgcatttttctaatcaatgagtcactcagggaagaaatttatgctcagatccatggttcttaactcagggatggatttctagaatgatctttggacaccttaaaactttaagttttttcatgttagtcctggtgagaggatggttgtgtaagatgaacacagatggccatagtccataaaagattatagtaacttataaacagttttctctttcttaacatctagcattatctctgagccttacatgtatacaaatattcaaatcataattgttataaaaattcaattagtaatttttgatgtcaataacatggacaaaatccgtgattttgaacacggatttgaayatgtgatatgaacaagtgattttcataagaatacctggatataatatgctgtcacttaaccataaatagcaaacattcaaaggataaattcatgtgacctagtgggtttcaaattcactatagacttgattggctttaacttgggtttatgggttgccaagatcagttccacctagtaagagacttgacatgctcccctgtcctagacaaccagttgtaaactgcatatgcagcaagaacgcatttcatggtacccctggggacactgtattctagatactgttccagaaccttcttacagatcataattaccaggaagcttttccaatgtggagattctctggcatcctctctagacagtctaggatgaaagtcctggaatctgtgtgtttcataaaccctcctgaataatagaaccacactattcaagtggacagtgtcttgaattgggagataatgtcaagttctgtctgactctgctgtacctcaattttgccaacgggaagaggctcacagatcacatgggacttgtaactcagggtctgtggccagttggctccatctgcttacttatttcaggaggagaaagtccaagggttgggagtgagtgggatggggatataggcagatttgaggaatagagggcccttagggaaaaattgatggagaggaaattggctgcaaggcagcttggggccatacaaagggtaaccaactggattggtttgcacaggattgtcctatttttagcactaaatatcccacatgctaggaaatcttcactcccagatattccaggacagttggtcaccctacttgtaggttgcaaaccacaacctgtgagacagaagctgttatagactgagtctttgtgtttccccaacaacttattaaaatatatgttgaagtttggaggtgggaccttgggaaggtgattaagccatgggattagtgcccttataagagtacagaaagctagcttgccctcttccctccatgtgaggctgtaagaagtcagccctctgcaagctggaagagagcccttatcagaagttgaccaggctggcacctgatcttgaacttctagcctccagaactgtgagagataaatttctgttgttaataagccactcagtctatggtaatttgttatagcagccagaactgactaaggcagaaacccacataataggctcaaaatacctctaactctatcaatatcttcttacagctgaagcaaatatttccagcatggaattagtaagcacctattctgatgtgattgaacggaaaatggaatgaggattgtcttttccactgcttatgattttagagtgtggagaaggactgttcatgttccacatgactcagcatagtagcctttgttctgtctgaccaaggatgattgatggtttggagttttagcaaaaactgtcaccagaataactgcacacctattactaaaaataataattccatagcagtactttattatatttttctaaaatcttgatcttcaaattgaactttcaatttgggtaagacactaatgtagtatgtctatttagagtctacaattattctcatgcagaattctgcataatctataggtctcttccaaagttgaagttgacataggtcagagtcaaccagaacctgaccttttcgctcatatttccagacactgtccacttgaccagaagttttcaattaattggaaatgcttatcaaatttacagctgtctgagatccctaccttaaaattaaaaattaaaatataaagatgaggcctaagaatccctacatttgaaaaactcccttgatgattctgaagtgcaagaaggttcagtaatactttatagaacacggtgccactccaggggtgacatgaaatatgttcctgctgcaggtgcgatttagaaatagatttctagaataggaaagcatttcaggtatcctactaggagcatctggttatccataaaacttgatatttcagcctatgtgggggcaaccccagatagtctttgaaagtcagtaagaagagatcttcattcaacctcagaagtgcacagaatttccaaatatcttttagaaacttaattcattatggtgtgtgtgtgtgtgtgtgtgtgtgtatgtgtatgtgacatcgagacttctaaagccttctagagcctttatatatattcaggatgtaccatctaatgctttaactgaaaaatggctactattatggaaagtagtacttcatttatttgtcttaagttggttcctttaaaatagaggttttcaattggggtctattttttgccgccctcgaggacatttggcagtatctagagacacaactggttacaatgagggggtggacattcctggcatctggtgagtagaagccaggaattctgttaaacatcctgaaataaacaggaccacccttctccctcatcaaagaattatctkgttcaatagtgctgaatggtcaatagtgctgaggttcagaaacctttgctgtaaaagctcttaagtgaataacatcaacattagctaacaatgacctctttatttgcatcaggcattagtgaatggattgggcattagtggatggattttcttattctgcacaagaactctatgatatagttttcattatcacccccagatgaaagatgaggaaataaacttggagatgtaactggtgatatggtttggctttgtccccacccagatctcatcttgaattcccatgtgttgtgggagggacctggtgggaggtaattgaatcatgggggcaggtctttcccatgctgctctcgtgatagtgaataagtcacatgaggtctgatggttttcaaaaggggagtttccctgcacaagctctcttctcttgtctgccaccatgtgagacaagcctttcccttctgccatgaatgttaggcttccacagccacgtggagctgtgagtccaataaacctctttcttttacgaattgcccagtcttgggtatgtctttatcagcaacatgaaaacgaactaatacactggctgaagggcccaaagctgctgagtagagggtggctgggtggaaagtggggaagtgttagtggggctttccccactctgactccatagcctaaactcttcatcagtatgctatttaccatccagcttaaatggtaagtccccaaagttctaatattctagaatttggaatgaaatatatagctggtctatatactctctatataattaacgtattttgtaagtcattttaaaatccatccctgactttgtcttgtcagactgaagagatctagatttgtggttgatttatttgctacagcccctctgtttctgtaattttgcctcctctgatcgaatccatctctaggtccctgtgcctcttttgatgtatatttacctgaactgcatagcgtatttcacatggagtcaaatactacaattttatttgtaaatatcagcagaggtactatagttttacagaatgtcaccactggaagaaactgggcaaagtatacaagggatctctattatttcttacagcagcatgtgaatctacaatgatctcaatttaaaaaaatgaattaatatgtgaaaatgggaacaagggcattttataaaataaatatgaaataattatgcctgtgggattgttttccaaacccttcctagagatgcacattattttcttggcttttttgtcatatcagtatattctatcagagctccccaaatcccacacctgattaaactaatagcttagtgcttgttatttgttaggagtagctggctttgttttctttaatggcatcattactggcctgcagtgcaagtcatctgccactattgaacctctgcttcatggtttatgagcttgttctgtggttgcttagcatttcactctgaaaaatgttaacatcatctgcaaattcagatttatcattctgcacttccttttccatgccatttctgaaatgcagaataagattaattcaggacccatttgcaagtattggtactgacatgtccatcataaagacagacattaatctcttcccttagctgcatattgttaagtgaactttgcatccattgcaaaacatggcccaatcatcattcagttttgttttaaaacaatctttggcgtgaaaatcttgcatagacttcttgaaaacccagatatattttcatatcaatggttgtttaaaaatttcttcttccatgtcatttctgaaatgtaaaacaagattaatccaggatgcacttamaaggattggaactgaattattttcttaaaatattaattcaactctgccctttgcaaaaggttctgcctagctcagaaagatagttccttgcagaactttacatgctacttgggtgatttgggacaggttatttactctctcatcctcctcagtttccttttgtttaaaatgggaaaaagcatactatctaattcctaggattgttgttagaatggcatgctataacatatatatgaaggtcttagctcatctcctgtggtaaatgctccataaatgtcagctgtcattatgttaaaagctgggaattctttctgtactcagaactcatatctcctttcctccagttgataatgcttacatttgtctttgaatatgtattctatcataatttctaactacttccagggattggaaatgacatttcatattgttcattccctaggtcccctctagaatcttgcatatgattgacattacacttattctcctaagcaaaaggtatttataacagcaataatctatagagctgatggctgaataaatactacctattaaatttggaatyacatttgtaacaataaaatctgtactgtgctaaacctatgacataacttggccagaaaagttatctactattaataatttttatgtgattttgtaaccatcttcataatctatgaagaaaggagctttgcattaaccccttgttttctaaggaaagatttcaaaatgtatagatgactgtaattctctgaggccacttctccaactgctttataggaaggaaatatcagtcctacagcccaaactgccaggtagttatttaatttttttaatttactttttacattagaccaagtactgtgttrttatacctgattgtatttgtcttaaactgattacaaatgagaattctgaatttgaagagacttgcctggccaaggatataacaactgccaataagtggtatcacagacaaagcccaagcctctgactccagagcccgggcttttaaccagtagcctatagtcattacaaaaaatattaatagactttatttttcagaacagttttaggtttacaaaaaaactgaacatacagagagttgtcaattaccacttttcccctgcacacaggtttcctatatattttagtcactttaaaaatacctttctttgggttcttttagtattagcttttcatgcatagaaagagtgcctggaagtgaccagatggcatgcccagaagcttggtgtctgacactgctcttgatgcctcccaggcccagggcttggtagacaacctgtcctgtctcttcgagttccttgagaatcatacgttcctctggctctatctggagctgctggtccaacttccctgagtgaattggctaattcagcctaactcatgccacttgagatgaatcattcttgactatactttctaattgacttgggatgagactagtaaaggtaccgcccacatcgaaggttggaatttccttcagtggtctttctgtttgctttgtatrttcaatgttccccaaatattctccccatagtgcttctgctcataaatgaaaactcccatttgaaaatagcttttgtcatcttaatagcagatttttatcagctgtaccactaaggtgatcaactattcaagaatcgactagaagacctggagagtcaagtaggctgaaaaatgataagcatccagcacccagctttctctgtatccctagagggcacttctgaatattccacactatgatggataatttctctttccctagctccacagctcagggagaaccctggacctgggcaggacattgttcagccttgttgttatctgagcagttggctccattttggtgacatagggagagtaaaagatgttctcagagatcagaagctgtccattggacatttcccttggttattgctcaaattcaatgagattgagagacattaaatmatgcatcccaggtcacaccagtgacaaaactgggacgagaatctgggtcttcctgagcctgtggctcgtgtttttatccattatggcaaactgcctcttgggtttgcagggtgactgtcatgaagcccagccctgttttcagggtgacaaatttcccacccctccagctccctaacacgtctagtggccatctatagaaactggcacataagactgcttggagtgctgacctcctcactgctcagtcagtctccccaaygcagagtcccttttcatctgccctcattcccacctgacatgacgatactgcatctcctttctcagtgctgtctacccaaggaagctcatctgttttctcgccttggttattgggatgacttcaggtttacccatgttctctctcccctaaccatatagctaaccctttagtgcctcaggaactsaaatgtgacatacctaaaactgaacccatcatgtatccatrttttcttggttgtttttcatctttgtttttctggccctctgtgtgtgggtgatgctattatcctccctgctgtctgtcctgagagaggctggttgagaatgctaaggcctgaacctcattagaatcacagacatgcttttggcttatttatcatttgaaaccaacaaaggctgaagtttggcattttggaatgtccctgaatgctatttatgagcccaccatgatgggcaatcccaagagtgcaattttacgaatctacacatctcagcaccccatctcaagtttttgcagatagagatttacttaggtttggaatagctttaaattcacattagaaagatagatttttaaatctgactaactcatttaaccactataatgtagcatttgcttctgcttggggttacagcctgagcagaagtggtctcttggccttcacacactgatagtaacttcttctctatgttcccttctgctcagtgactgtgctgccagaaacactctggcttccaagtcagagatgtggcatcctctatgtcaagcactggtcaaactctccctgaatggagatagcctagttacgcaacatttcctagtgaatttaaaatgaagagcatattactaccagcctcatgtagttgttatgaagattaaatacatgcaaaaaatctcagaataagattgaggacacagtgagtcacttcataaatattagatatgatgattattatgtttttataaatagggactcagagtagtgacaacatgttgagggatatattggttcttattttccacattaaccctgtagggtttccaaatgaggttggtgttcagtaagagaagacaatattcaactttcttatattaataataatatttgttaaaaataatgggtctcatagatgctgtgttcagtagtttctatgctttatcttaagatttcaccaaataccctatacaaaggatgcatgggtgaatattgttacttttaagaggaatttgttttaatgtgtattagttttwaaaaatgtaactagtacatcaaattcatgaattcttggtcattgcttaggatgaagcgtaagcataagtaacagcattgttactacagtagtctccccatatcctgggcttccctttyggcagtttcaggtgcccacagtgcagtacaataaatagtttcagagagatcatatttacacaacttttattacagtatcttgttataattgtcctattttattgttagttgttgttgttaatctcttactgtgcctaatttatgaattaaactttatcaaagctctctctatatataggaaaaaacgtagtatatatagggtttgatgcgctctgtggtttcaggtgtccactgggagtcttggaacttatcccctgccgataagtggtgactactgtattgacacaatgttgtagagagtgtctccttttatttttcttatcacagtcctgtgaggaagacaggccaaacaatgaaaaagagaggtggggaaactggctggagccccacagaaagtataggcacaccaaactcccggctcccagaccctttcctctaaaacatactgcatcgcaggatgagtcctggcaagctgccccttccttggggatagaaagtaatgtgcccctagggaacaaaggttccaccttagtttaatattgccatcagcttctccctactgggaagyagggtctggaagcagtggcctggactcttcccaggacagcagcagcattggctctgaatctacactagcctcttctgagcaaagagctcaataattctgtctacacaaatacacacacatatgcatgtgtcagctgatttaattaagccccttctcaactcaaatggggagtttggacaaagaactgaggggttacaaaattaccagtttttgactggtgttgcttttcaattggttgctttgggatctttctggctcacagcttccttcaatagtgaattggaggcaaggaggttaggatgttaattgggccacatggtaaattatgcaaatgcccaagggaaaacagatgccatataaatggaggtttacaattactgttgcaatgcagttttttaaaaagccatttgtagtgatgtgtgattctacaaagttatattttaggactctatgggttccagaaactgagatctttccctggcactgcttcacagtcatgttactaggatcccaagtatttccattttggcattataaaacagcaaccagtaagagaccttgttagttttgaccctggggccacaaatgagctgaagggttgaaggtctcagaccttttccatttcagtaaaawtatggtggtcccaggtgcctgctaaagattattttcttccccattatttccagaagatatttccaagaaactggtagcatgaataaaacacatttcttcttagagcctagtggtttaagaaaaggatttgatgaggaacccatacacctactggtgtattttgaaggtgatattatatgctatgagttattggttagtaactcttattcctgttactcctgagggctctttccaaactgcagagttttctgggtaaattattcatggcaagggtgttgcctgtggtgatgtgtgtcagtcacaccattacaccttgtcttgggctggaggcactgccatttgcctccctccaactcttttgtcatcacatccatttctgactagcctcagccaccgacagtgctgtcagtgagctgcaaaggcaaaataggaggcgttatccattctccagtctacaatccaccaggggagaagccagctgaaaacacaggaggacctaatcaggcctttgatgttacgcaaagcagattgcatttcaagctctagagaacaaggagccactctaaatctgattaagattcatctggtaccaaattgtgataagtgtttattttggacaagcagagcatcagtgttttctgattctgcttattcatccagaaaatcttttgttttcccctttcgttggagaagaagtagtaagagaaagccttggctggtcctgacttgtctgttgagcaaacttgagaaggagactgggctgcttcttgaataactctgtacagagcctagggtgcagagctccttcttctggccccctgactcagtttcctaatgatctgatcccctgctgctgtgcctcagtcgcctgcccttacttccatagcagatgggtacttaccttctggaggaccgtgaggtggggaactaacttaaaaggggattggttctagtgagaattcagggacagagatggctagccggggagagggttcagagaaggttttgtgtatgttttttgttttgcctgaaataaaatcgtacataaagttttggagaaaaaaatagaataattcctgattctaccatgctttgtagttgctatgtaacctctttgatcttttagtgcatctatttgtacatataaacgtatgtgtttatgtaaaacrgaatgttttgttttgaaatttgtggtttccatttagcatattctgaacatcattccttgtagataagcagagttctccatcatttttgatgattgctgaataattttctttctggggactcctctcccctctcttcctcttgtttttcttttctctcttttcctcctactcccttctctcccttccttcactggttgttataccttttcttcctgataatctatagtcttttgctccagctccattttattgttttctttttattgctctaacattttgtaatataccctctgacttatgcaaataatgtgaaatgaaaagaagattgttttgtagtttggggttgtgttgattgtataactcataccaaacttatttgtttcctttgttttgttaacagctttgtaatattttctgtccaggttctgtgagaataaacatgacaatattttgaaagcttttcatatccccagaaggaagaaatgacaaagaggcaagccattataatgaatgcttatgatctttatttaggaacatgacagtctcaagccctctgtcacttctaagtcttgatgatttgtctcatttgcccagacccctcaccagtccacaaagatgggcagaatgaggccgacagtgcaccagaagacctccactctgtggggaccagcaggctgctctatcacatcactgatggtgataacccactgctgtcgccacgatgctccatcttcagccaaagccagagattcaacttagaccccgagtcagccccatctccacccagcactcagcagtttatgatgtgagaaaactgttttgytattgtcttcatttcatacagtttttcaaataccacatttataagctacaatgaagtgtgactgaartagcacaaatgtgcctgcctaacgcaactgcgagaytggaacaataaatgacaaaaattagtgtacttgctagttggggatgccattgcaggccttgatacctcaagaggaaatggtcatgagagacaggatagcccagcggctcacatgtttgaacatttttggtgaaatgaccagaatcttaagtaagtatatgtacatgcacatatcagacatatcattcttgatgaactcaatattctttccatgtccagtggtagcatcaatggatgagttctgggaacacttgggagctgtccatctacatttcttgttagattctagaaaagtggtagcttacaatagctaccctcatccaaataatgtgtgtgtgtgtgtgtgtgtgtgtgtgtgtaatcggatgcctgccccctacacattccacttggaatttgcatttgggattgaggaactatgtgttgtttatgtttaagttccacaaataattttgatgtataattaagattaagaatcccttggctaaaaatattcccagggaatccctggtttctccgtcagaactcctgccattttttcttgaatatatctaaccctgggtccatgaactatctatcgatggacctgaaagagttagtgaattattggcattgcatgtaaagtgtgtgttatgtgagggggtgtatgcaatttctggaaaagaggcccatcctttcatcatattaaaaaaaagtcctgttatgtcaagaaaagttaaccactcatctaaatcttccttgaaaatgttggtaggtatggcttgggcaacctactgaggacagaacctcaacagtactgtctctttcgagtcttaaattggcctcctctaagctttacaaaacacatttcctggactaatatcttgacattttacactaaagtccaagacaacatccacccataacagagttttgtgatagggagtctccattaatgagcagatgctaccatggtggcctcatcaaataatgaacttccctctggacttctctgacaatccaggaattttggtttgtagatcaacagaactgtttactggaagcccactgtttttgataytccttcctccttgtaatcactgcaggccgcggagttcttcacgctgcagctgtggagatggcaaggagccacagaccatcacccagctcaccaagcacatccagagcctcaagcggaaaattcggaaatttgaagaaaaatttgaacaagaaaagaaataccgggtaagaaccctggggtttgacataggagcggattggtcagaggtgtctggattctcctcagcctctgtccttcctttctgggtgcccttctttgccaggggacagctctgttcccatgggccaacctggacctatcatagagtcttcatcttctatctgtcttgttctcacctgctgtcagttgatctctgctaggatattttctagtaatggattacaactattatttccaaacttatttgattattgatctcacctttttttttctgaggaacaaaatttggaaagctttgaattatggtcttcttcttcttcttcttcttctttttcttttttctttttttttcactttttctcaattgcattttgataagaacttattaaagatccaagggaggggtctccaattgtggaacagaatgagggagagatggtttctttgacattaaagtatttccttgttggtgaatgaggacctctcaagtgacatctgttcaggccactcataagaaccaaccctaagccwtcctttccccatcagagagacactagttttcatgctagtactgcactgcagcaaacatgagcctcctttcttcttatgtaagaaacaatagggtcataggtaagtgtcttgatggtcagtgttgcttttattttctccagtagtgaccatggcatacagaaaaagcatatccacagagaactggacaaagacattgggtcttcggcagagagctcagaatagcttgttattagaataaaagagaacagggaataatctctcatacatcttgaaatatttaaaggttcactaaacacttggtacagaggcaattggaaagttcttgtgagtatgagagtaagtactggggagggaggtgagaatggataatattccactcttccattcttcctgtcctgcttcccacagtggcctgaaattcactgaaggaggagttttaaggagcagattttagctttgcaaaaatgggggaaaaatcagtttggctttcaaggcaactttagtcaggatgttgaagattgtcttccccaaagtcaggcagtcacagctatttattgtcttttacagagcagaagggagctcaacacattattagtccaggattttattttacagataatgaaactgacacctgatggaaatgacttgcctaagatagttgtgttctatcaggtcgcaacttgggtcagtggattacagatgagtaggttctgcaatagaatagaagtaaaatttttaagtgtctgctttttaaaagatccagatatcctgggagaagtttatttcacctgtttgctgctggcgtgttactggatctatgatgtcctcgtattggaaaatacagagtaacaaccaggggctccattcccagcacctgttaacacttcttatctggcagttcttgagtcagactattttggatttgaatccagcacggctacttaagaactctgtgattttggacttgttatctttctgagtctcagtttggtcatgtgtaaaatggagtattaggtagcgacttcttaagtttgtaagtagtaaataaggaagtacatacataatgcttattacagtgtttggtacaaaggaagtaaatggtcctagataacacaaactttttaatctatgagttatatatttaaataggctactccatggcagtctctgccttgtcagaaaataaaggaaaattgtacatgttaattctccactggagttttctacccacagccacagatcttggatgcttattttggaagagaattcctcctggaaacatcttctgcctttgtctagagttttctgaagctagagctcacatgcacatgcacacacatgtacacacacacaaacatagacttaaatacacatatggaaggacagatcagggagcagtaggggaaggaagctccttggtcaccgctgcttcagtgtctatagaagtctttgttattatcagaacctcacaggtctcaggaaacgcttttccttcctgtcagcatgccaggctgtgcttagaggtttgacatgtcagtgggctttaactggttgctgtgtgtaaggctccccttcctgacagcctgactgtggaattcataccacccattgctaatttttgaatctgggctcctgctgggcctctgtgctattttgatacccatgtatcacgtatatctttccatctctgtttactgtaaccattttatatacctaccccaaattctctacatctctacatctgattttgcatttgattattggactcttgggctaagaaaaggctgcgtcagccacacgtctacyttcagtggaatcagggaatgttagaattggaaagaatcagtcttttgtcttatctgacaactgaagatgctgaggcccagaaaggggaagtgagtttcccagaatcacacagcaaagaatagttctagccagaacagcaactgaggtctttttataaccctcccagtaatttttctaatgtgtctttttgaaccatctttggcagatcacaaatctcatacaatggcacttaggaggtcaattttaattgcattgaacaaaatctaaacctatgtaatttccgtgtgtatgacgtttggggtcttttgaatcagaatatttcacttaagaagttaaaagtcttgaagatctacagcttgtatatgagaactttccatgtgatttgagagctgccatccatgtgagtttgatttaacccttttaacagcttcttcaagggtagggaaataaattcatttcagaaactgatttcaggctttaaattattttgtcagaaatttagccttaaatttcttctaagttctatgcaccgtagtaaaaacttatttcttttgcagtcactggcttaaggccttaggattttgtgtgtgtgtgtgtttgtttttaccatatttcaaaagatggaaataactgtgtggaacagatccagtgaagcattgttcaacaaggtgtgttctcagatcggagtggagaattctctaaggattttgggaaaccaaatgtaaaacattgactttccgtgtaaccagactgctacccaaaccaaagtactagacgatacagtgcatcattctagcaaaccatagataggactaggctaagctgttttagagagctggggattgatggccacgtgtcactgtccatggtcctgaaaccaggattcccccccccccccgccaaaaccccttccctatccctctgccatccctcagggaaaccagtctsctattcaagctcttctaggaaagaaacattgtcaatcttcttttctattttaattttaaaatgtatggtttttaaatcactttagaactgacagaatcatgccttgtgttttacaatgagcatacctaaactcatgtacacgtgatgatcctgtcacacagtagttttttcctttgagttttaaaaatctgccatcttcctgtgcctccctctcaccaacaacctgccattgttacatggatttagtggatccttaaagaaaaaaaatgacagaacccctagatttggtcattaacaatgcacatatttcaggctattatgtttatgatcatgtcaccttgagcatattttatacttccttgtacatccwtaatttaaagtaaccattaattttcttcagcctgcatgtaagttcctatggtagccttgacttgtttaagatcagtttttactgatctgtgggggtagagggacagtatgtttgactaccactagtgaagatattagaaatccgygtatccccctaacaaactgacttctcgggaatattgtcaggttttagagattccggagtctcctttctttagcttagaggatataactgataagagctaaatcttccagtttttcagtattctcccacgggttatggtcataagcatgtgtgtgagccacaagcaaggtagtaaccactggtttgtatcagtgcagtcatctgcagtgctacagaaaatggcctggcaatggggtatatatgggctgtgggtgacctgcaaggtgattgacagtttgactgcaggggcactggcatggccaggactatgtgaaaaatgttaggtgaccaggcacatttagaaatagtgcccatagcaaggattaaagagtagaggaggtcaagaatatttactgtttcctagaggtaacttcatcagaagcaactccatcagaaatttcacacccgaatttctctcccagctttatatattcctaaactatctttgtgtagctcatctgtttaaaaattttgtttttccttttctctttttctcccccaccctctccctccttccctcccttccacccccattttttccttcccttggtagccttcacatggtgacaagacttctaatcctgaagtcctgaaatggatgaatgatttggctaaaggtcgtaaacagctcaaaggtaaatcccagccaaagatcttttttcctcacaaaggaagcagttaaactagtgataatgtgctccagagcattttagattcatttccacctgtgccctcttgcaccttgttttctgcttagactgtaactcccttttgaaataaagcaccctgtatctctgtcattgtttggccccatgtaataaacctccttacaaagaaactgaggacctccagactcccaagtggaatgattcacttcaatgccaggaacatttcaacatgtggagcactaacctccctaggttattggattgttggatgttagaaacagaagaggcctgagaaatcatttactccacacacttcagtgcatggatgaggacatttatgctcatagagaggggagggttacatagctggaaggtggtgggccaggtgtagaatgtggttctcctgccgtgtgggctagtgtccttctttttctgtctttctctggagatggtggtgagagtattaactctaaaatccatttaaaatagactattataatttaccaataaaaaattattttcttcctctctccacactctaactttaatacttagagacatgggagtttttccaaatttctgcaaggaragtgactaaaaagaactggaagggaatactaattcagtggtattaaactgtaatgatgtggcaggtttataaaatatgcaatgtttaaacatcaagacaaagtctaactaggaaacaaacatcaaacaaagaaaatgagctatgtaattgagaaatcaatataaatgcctcattcaaacaaccagtacccttgcatactctaaaatgtaattccttgataagtctcagggggcttttttatttttaattatctaggtttatataaagccaccttgtaataattcctggatcttaaaagctatcataagacaaaatagcaaaatctgtcatgttgaggctgacactcccatctaccctttcccatcctctcctgtatttccttgggtgtctacatgcataatgtcttccagaattatttgcgtttccacaggagctcttgatgaacccacaactccataatctaagtaaataaatctttgtgtgtggaatttcgggtgctacagtacatggcaggtggggccaggcaccactggttttcctgcaaactcttcctcctctgaaatctaaaccactgagctactcccacacataccctccacctccatgagatcctagcctctagagccctgttttcacacccgattgggagcttatgctaatggctctggttataagggttgccgttgccctgtggaaagccatcattagtgttcatttmtacagatttggcatcaggggaaggaattcctgaaagtctctccattcttagaactagtgggttctctttgcttatgataactcatagcatttctcttagaactaaagctaaagctgtcagaagaacaagggagtgctcccaaaggtccacctagaaacctgttgtgtgagcaacccacagtccccagagaaaatgggaaaccggaagctgcgggcccggagccaagctcctctggagaagagactccagatgctgccttgacatgcctgaaggagagaagagagcaacttcctccccaggaggattctaaggtacatcaccatgtcttgttatatagagggcccctgtagtccacacagtgctaatgagatcatccaatttgtcagagcactttgccattacatcaatatttttattagcctggctccaaaatttcagatgagttcctgayaggttactggccacgagcagtagtgccacatgatgccaggctatgccaccattctggaggttatagtgttgtgtgttgataggaagtaaatggcaaagacaccagggtatatcatatccctttctccccaactctctccacctgcaaattagcaaatgaacccaagactaggaaataggcatagtgcctaaaaggaaaggactccaattacagcccctttccttatgtcttattaaaaataataaagcagggatgatctataaacagtaaggaaatttgtttggtgtttatataataagaatagagaggtagagttttttgggagagttaagttgaaatacaagtcttcagctttggatatcttagttttgaagtctctgtgaggcatctagatagagttgtcaggcatttgaatatatgagcctggagctcaaagaaaagatttattatattttacaaagaagaaaagactgattagtatttacctggttaatctctccttgtcatgcatatctatgcttccatttcaattatgccaaggaagctttcttgtagtcccctgtctcaaccctaagactggcgtgattgactttcagtgctcgaataacagatgcaactaccctatcacagctctaactatcttgtaggccactttctgtttcttgtactacatcttgaacttcttacatggaagcactatttataggtcatgacctccccttttctgcacatagtaggtattgaataaatgtttgctgagtgaatggaaaaatgarcagatgaatgaacaaactagcatatttaattttcaaatgaagtcttcttgaggagaatgcctcctttccctgttctattgtacattacctggtattaatcataaagtgacaacatattccaratctcaaaaggctcaacatatgcccctggattagtcatttacataaggacttgtgatctacaagtagaaatgggcctgtgaccacatctttctttatgaaatacctttagccttaaaacaacaacaaatacatgttgtgaggagtgaagagaaggtttcatccactcagccatcctatccctaagcctaccaagattctatacttctgtgacagtcagtgggtaacttctgcatatatatacagaaactcttaggtatctctgtggttttccatccttcaatgcttctgaagttctttccagtattttaaagtcactttggccacatctattaaagcatcttggtcaacgtctaaatctctgttctactcaattaacaagggtagtaagaagagctgggattgatatagtagagttagaacaggattcagcacttgaaccagccactttctaaccatgggcacttggcaagtgaactgattctctgagattcaacttcctcatctgtaaaatacaggtaatacctacttatataattatcatgacaataagagagaagcctactgactggtggataatagttcatttgcaaaaagatttaaatgccaactatgtgttgtgaagtagaatagatgctagatataaaaaattaaaagatatcgaagccattggggggtggtcaatgccctcatgtagttcatgttgtcctgggagtggggatacaacaagaaataaacaactcaataaaaagaaatcattaaaaatgttgataagtactatgcaggatatttgacaggtgatatgatagaaaatatgggtatagtttctactttagataaagggattaggaaggccaagaggtgacatttaaagaagaatcagcaggccaaagagagcagcagaaaacattctcaacagatggaattgcaggtatgaaggccgtgatgaaaggaagagcttgttgtgcactttgaattctcaggtttgagggttggagaacaggatggcatgagatcaagtcagaaagacagattagaacccatcacacagaacctttaaagctgtgggaagtattgggaagttgttgaacagttgagagcagaaaagtgacatgacgtgattacatttaacagatccgtctgattgctaagtggaggatacatcacaggggaaaagaatgaaaaggggagatggaatgggtggcttggattagcacggtggccttggagagggaaagaagtggatayattcaaagtatattttgaaggtagaatcaaaaggacatgttgaagcattagatgggaggaaatgaaggcaaaaaaaaaaatccgggatggtgatgggtccatttactgatacagagaaaactagaggagcacactggggttgtagataaaaacataaacggtcagtttgggatatattacatttagtatctttcaggaatagggtgaccaatcgtcccagtttgcycaagacttttttgcttttagcactgaaaatcccatgtcctgggaaatgcctcagtcctgggcaaactgggatggttggtcatcctactgaggcatgtaagtcaaatagacacatgcaaatgagagtcggaagatcagagaaaaatctcctcatgcgtggaagtcaccctgtataaatgccaatcatttctattatttttaatgaagtatctattattttgtttaataagtgtcagaagccccctcaaatatacctataatgtagctcttcagtaggctaaagttaggccctttaaacagagagcatctgtaatagaaaatgtaaatacataaagctgagtattggtcttgagaaagcttaatatagtaaaccatgtagtagctagtcagccactacactcagtgtgagtccagaggctacaacgtaaccaaagagaaaactttgtattcccatagcagctagtgttatttctaactcctcaatgagctcaatagcatttcagatcatctcattaggtcccgtttctttaaactcgaagagacatatggctttcatctggggtccttgccttactgctgaaaatgcattaaatattaaaatttcaagataaagaatgacgtcttttctagagagactttattatgactctttctgtaatttccgcatttggtatttagtcacagcccatactaaggctgataaatcctatagcattgccttgttgcttcagatactgtcaatgagtaattttcttcctgttttatctatggatgawytttggagataatcacttctgggttacagggcatggctgtacactggaaattaattaatcatcccctgagctgaactgtagtgcctatttatgtcttttatgtccttttcttttggaaatactgaattggtgctggcacatatatcaatattgacctttctaaggactgtaagtggggtcaggtgcacagctcaaattaccaaggggatgagtaatggcagttacttcttctggcctctcatcaactgtagcatctttgaggatgaaatcagatttttagaaagtatacattttatctggaaaaaatcaataaaaaattaataacttataagcaggttgttgttggttggaaagacagtagacttagagataaagggcatgaaaaggaagatcccatcaaactttctgctttcctatttatccttcttttttttaaagaaattattgaatagataatactttctcacatagttcaaaaagaaaatatataacagaaaatggtaaaaagactccttccmaaaccaactgccatctccagctctgaggtctcccaccccaagcaggtaactattgttattaatgtcttatgtgtcttttttggagtttctatgtagagcatatacaagaaattatcaatatacattcctttttattttaawttttttagagacagggtgtcactttatcattcaggctagagtgcagtggcacaatcatagctcactgcagccatgaactcctgggctcaagcaatctccccacctcggcctctcaagtagctgggactacaggtgtgcaccaccatgcctggttgagtattttaattttttgtagaggtgagctctcacttttgcccaggctggtctagaattcttggccttaaggcatgctcccacctcagcctcccaaagtgctgggattacaggagtgagccaccatacctggccccagtatatattcttaacttgcctctgttagagaaaagggagcagtctatacaattatgcatcctttttactttgtatattctggatatctttttatatcaagacatagagagcttatcattctcttttatttttaaaaaattattattcaatagcactgtggcattcttttttattaatggatagcattgacattaacatcaagtcaactagtttgaaagctcaaataacatttgatgtgtgtgttattaatccagaaacatttacttataaaatgtaataaaagtgatcctcattctgcatattaggaaactgaggttcaaatattacatawttgyaatgttaawaacagyttataagytttgaagctggttatctgaactcatgtcttctggtttcaagacaaatattaatcttcaattcccggcttgaacatctaaattgaccaaaacattctctttagcaattgctttctatgataatatccagtactgactttccatcttgtttgattgtttaatttaaatggtcagacttgcctgcatatagtgtctccctcaataaggggatggggatacttagacaggaaaatcttggcaggacttcagtccctaaagctaagaagcatgttttccattgctcactgtccagagaagagaatgtcagttttacttctctccttaagagacatctcatttatggggataattggaatgatttcatttataaatttctgtggcttactgtggaagaatacatggcaccactcccatgcgggaaaggaaaacaaggtggtagaagtgctgaagctatggcagctttttcctaaacaactttctgaccaggacccagaaagaaactaatttgggctgacccctcagtagcagttatgtctcttggaaagccagtttatttccagaccttgatgattcaaatcacctacttgatagggggccaggaattttcatgtggcaaagttgccaagctataaacaaatcatatcaaattgtgtcctatatatggtcctctcttgctcaacctcctcttagttatacccctgatactataaaaatggagaaactggaagaataatcatcttttaaagtttatctccttttatttatctttatgacaatccattcatagctctctttggctgttttaggttattcaacgtgtaaccraaaacataaaggaaaccttgtttccttcattcataaaacaaaaatgaaaaaataggtatatcttgcatactacagccagcagcaactatagaattagggaggaaggaggatgtacttcagaaagagagagccattgaattcagargagaaaattatctgattcttagcagacagtagctgaagaataacaggaaagtctaatgtatttctgcccccttagatttggggtatcctgcagagcttaccttgattcagttttctttatgaagatcactttgcaggcctatagcttttctgtgagtagaaaacagctcctggcacataatcccactactaaccttcctcargcaatctgctttcctgtcctctatctgaggatgagcacttgtagacttagaggtttcacagtgttttgtacttactatgcatgagggtatggaaccctcacgtttcctcagggattgctttaataataatcttaagaggaagacaacggaatcaaagtgaaaaaggagtgcatacattgtacttgttcccgaatttttgtctggcatctgtggaagatagttttctataatggcattcatcattctaatgtgtgttttggtcactttttccttttagaattaaatttagcttttctagaatctggggaatacattcaaatcacaaaaatcaaattgcaatggagagataccaataatagttaaatgcatcattatctgaaatactttctatgaattgtaagtcccagtaagataytacatttaaaaaacactatttcaatgttttctgaacttagactgagatttttttctgctgtcatctattaaaatcccatggaatagattttgataggaacttgttgggttttttttcatggaaagatgtaataagaaagtgtttaaagaatgattgggttagaaaatgaaaagatcttgaggttatttaaacaatacttaacaggcttctacagagggaggtgagacttaggtcacagcgtatggaacttaaaagaagattgctaaaaattagagtcctttttgcatataaacctgtgttgatagcttagtagtagggatggggatgtattgggtactgtgagaatttaaagaagtatgtgatatgatctctctcctcaagaatcctttatttgggcagacaatactgaaacaaagaaaacagttaaggcccagataatgagataagttgagaggaaaggtagatcaatatgggccagaatggtttgcaattgggatgggagttgggagcatgaggataactgggaagtgtaacacatgtttgagacattttcttttctttcaagggagacagatctggatggcagatgtatctggcatgcttgggtgtgtgtactttgataaaagatgcctgggtgattattccatgagttatttctactattcccttcccactacttgccaagtgtatatcactggactagagtaaaagggaggttatgtgtactagacatgcagaaaattaatgcagaatacaaagcaggaaaaaaccaatgcaagcagaggagttcggtcactttggataaataggcagatacatagacagacaaatagatggatagataggaagctatttaaacttttatgcacagtgtgatccattgaaaatagtgcttagggatgggtcttacagcagaggggtatagaatatattagtggatcaagaggttacacatttttttcagggaaggatattggtaactccaacctccttcttgtataggtaggaaattgaggattcagagaagttaaatgttttgtccaaaataatttagttgatatcacagcctrtcagtaacctagtatataatacaagcatgtagtgatgaagacctgtataaggttggtatttgtgactacatataatcaggaaagtctagataaaatacatgtttcagaagaaaaatcaatgtctggattggttttttaagaatgaagaagtaattaaggaagaggttccttaacacttacgcatttcagactcctccaaaaatcacattgctaaacttggacgtatcctttaagaaacttccaagaaaaaaactggcatgtgctacatacagtatcttataaatgactttctggccaggcacggtggctcacacctgtaactgggggccgaggcaggctgatcacttgaggtcaggagtttgaaaccaacctggccaacatggtgaaaccctgtatctactaaaaatacaaaataattagccaggcatggtggtgcgtgcctgtagtcccagctactcaggaggctgaggcaagagaatcgcttgaacccaggaggtggaggttgcagtgagccaagatcatgccattgcactccrcctgggtgacagagtgagactctgtctctaaataaataaataaataaataaataaataaataaataaatgactttccttttcatgataactgctgcattatagtattataatcctttactttgaggctttttgtctgctaaaaatgttgacgttttcattcttgtctgagagaggaataataattaatttcatgtttttcaggtaactaagcaagacaagaacctcataaagccgctttatgaccgatacagaattatcaagcaaatcttgtcaacaccttcccttattccaacaattgtaagtcaggatacttgcatgctgttactttgtactgatgtgtagttaacakgatgtcacatagtagtacaagagttataaaagacccttcatggcagtatatactgcaaacaaggctagttgtcatttcaaaaagtgaaaatttggtcttctctaaccccattactatatttaacagtggctgatattagaactattgtaaaataggaacatatagcacttgtatgtctagagccaattttaacatttgctttcattatcttgggtgaaaagaaatgatagatttcagtttggcattttctaatttgtaacacagctagacaaaacagagcctttctgttctgtgtgttggttaattttttcctttaatcagaaaattaacaatatattcttgatataatgcaacatttgtttttggtaccatttgaccatactgtacaagatatgagaagatttatttcaatagaaaatataagtactgaaattgaattaggctacttttaataaagaatgatttatgggaatacagaactagaaaagcatcacaaatcctactccatcaatatcaaaacagttacttgttcaagatatcaatataaaaaggaataaatattaacaaatataaatttaagtatgcttgggtacatttatacttccaytttttttgagacaaattatacttccacatttttaaagacattaagtgaataataattcatagtctttggaattttccctttatggaagcataatttaaaatgtagtaaggttcttatatttcttgcaagagaatcttctagttgtgataagaattatcagaacagttgaggagtaaccccactttgctttggccttcaaatagctctcccctgaacttgtcaatttactgagtatcctctgtatctgaatgttggtccccactgggacctgacttggggtatttctggaggataaaagttgtccgtagtccaccttatcttaactcatatcacaagtattaagctggagcccagaaggtctgagtgaaagggaggaaccacttggtagtatagtccagactggaccatatcctaatggtctgtgccttcattggcccagaagacacagatgaacttggtgagtgttttagcccagcatgactgctgcctttttgctcattaacttctgtaggtttttaatgaaactgcgraagagctcctcttggtttcttccatcccagttctcagtaggcacatgggtcacctactggttttcatggcattgatttatagttccccttcctgtttttgtttcctcaagaggcactgagcattacatgactttctttctttaactctgcctgtgataagcaggaggaagaggactctgatgaagaccgtccacagggaagccaacaaccttctttggcagatccagcatctcaccttcctgttggtgaccacctcacctactctaatgagactgagcctgttagggcccttttaccagatgaaaagaaagaagtaaaaccaccagctctctccatgtctaatttacatgaggctaccatgtgagtatgaatcctaagtgtggagtctcctcttaactccttctggtctgataccagtatatgaagtagagctggcctttgaaaatgctggactcaaaggggtgggtcaacagttctcagggcctttatcctagtctcttacatttagatgagatagtttttccactagaaatccacttggtagtaagcaaatgacttgccctttgtctcttaaatagcccttcagatataagccatttggattttcattaatattatcattatcattattattatcattattcagtagctggcattcctcatgataatttggccttctttggtttgtatcttacagcccagattatgagatttaatttaatttaatttaagttgacagaagtgtctgtcagagaaagcaagtagaaaatcatttttttggtggtggttctaaagcagttattcctaacttttcaaggggtgttgggacttytttgaaaccaatagaatcattttaagaaaatgcccatgtataatttcaagttcacagaatctctgaaaccatacatgagtttgggtatgcttgtgtatataccagattcctgctctagagtatatgacttttctctcatcttggtagaatgaagtgagtagaatttgcaatgtaactatcgctttcttctgggtcttattttcattcacaagggttttgctattctcccaatattcccacacttatttctctagattaagaatagaattttctttaaaagctgctcctctgtatctcttatgttcagtctatsaccaaatgctgatgagtattccttcaaaatatcccttccctcatccacctatattgctgttaccctttccagttccttcagtggattcaatcaatctccttgcctcttgtctgtcctttcccctatcctgtgatattttttccatcaggtaattttccctgcttatgtgcttgcctatggtcaggctctatgtgtgtcatatttactcamaagatactcttatgatgggaacacttttcaatcatagatgcttttttggctgaacagataaatctgctcatgatgatctctcaattatgccagtgcccagtaatgacaagtattttaccttatataggcctgtacttcttgaccatctccgagaaactagggctgacaagaagagactgcggaaagccttaagagaatttgaagaacagttttttaaacaaacaggaaggtatgtgtcrgcagagagatttttaaagctaatacttcctagagaattgctgttaaaaatgagctgcaattttttgcaggaacggtgactttttacaaaatgtatataatttccacactggcttagactcaggatttgtccaatgcaacattctaatagtgccagtattagggatgtttcatgggacatggtagctgtcaggtatgacatcaatctgtaaaaaataaaggataaactccaaaaatctctaactttgcacaataaatctcatcataaataaatgaatttatttaaacctttaaaaaaatctgttgatttttttagcccacataactgctttgttgttggtttcttagttccacaagttactccctaatttattaaataataattccttatttgctttaaatgtcttccttaaaagtcaggatctgtccctaattattttatttcaagagtygatcaaaaattcatagtcattctttctacttcttaaataaatggttagctgtatcatctgtcctctatttttctgtgtcaacccaagtctcattatacactctattagtttcctccaatttttggtgtatcatcaacaaaattacatatataatcaagagataaggttattgatctaatttggaagagagataaattgcttagctatcttgaacctcagttcccattttatgagctgaaatggttggactcctgggatactttgggaagctacagctgtcatgtgggatatcaatctttacaaaaataaataaatgaagagtgtaactttcccaaagccacaagttattaagtagatgaaatgagattaaactcattattcaactcataaactcatcattaaactcatcagtgctacatgggctcctctgtattcctctccatttaggtattgtatttgacttttcagttcagcaggttgagggttgtcctgatggaaagggactattttccaaaagcaccttgaaactctcatgcgtggtctacttacctcttagtccctggcaggttttccattttagcctaccagggatattctttaggactggacctattgagtgaaaagctttttgcattcagccaatacagatgtaacaacttattttctacttacaatcttcctttccagttgattgctacaagtccaacttacctttttggtgatgttaagtaatctagtgagaaatgttatgtggctcataaatttagaatataaagcatttgttatttttttccttttccatacttttttcttttataaaatgttcatgtaactttccttgtaaaatattccttggagtagtaactttgtctgtctggactgtctgctcctattatactttgggtaaatatgtgacttgcactataaagttcctgatctctgcctcttttggattaaaggtattctatgggaatttttcattcagggaaatatttgtggagatgttatcacatattctaaatctaaacagtcattacatatgagaaatgacactttaagatgtgcgtacactcttttcataaatttgagttccctgaataaatttatattttttagcaatttgaactcaggaatctatcgtaaggggtttgagaacttcccagtgtgctactagtcctscctactggatctgcagtgtcacttggtgtgctttttgtcatacatacagggaagttagttatgttctatgtatagtgttccactgcacctatgagtcttaaacccacttcagataagtctgtatttgtctatgaagttttatgcccccttgtgatgatatatttcaactaaatgcacaagtgatgatcttttacaactaaaatcaaacagttgaatggctaggaaatatggaccttaattttgtttatctaagacattttattgggaaggcctaagcatccataagttaaaataaccatgcaaatggattactaaaatgtttaaggcactataaatgttcttggtaatatttgccatacaagaggcatgagaatcatgcagatattacattattattaataattattagcctggaagtgtgctaagcactttagtatgttttatataatggagaaactccttcaggaaagacttggcaaaacttttcattcttgtcaaagcactctttttttttttttttttttttttcttttgagacggagtctcactctgtcacctgggctggagtgcagtgacgcgatctcggctcactgcaagctccgcctcctgggttcacggttcacgccattctcctgcctcagcctcccaagtagctgggactacaggcgtacgccaccacgcgtggctaagtttttatatttttagtagagacagggtttcaccatgttagccaggatggtctcaatctcctgaccttgtgatccgcccgcctcggcctctcaaagtgctgggattacaggcgtgagccactgtgcccggcctcaaagcactcttattagccaaaatggaatatgcaaaactayggaaaattacataattgattattaatgtttctctgtaataattagacaatttctttacttagatctatttatacaaattaaggtggtattcagacatccagccatgataagtttgactcataacacagaatggaggcaaagatatatgttatataatttagacaacagttaagaagaatgctgtctatggatttgtatactgttctgagttctgtactagaaattgcagggcaataaatagtgttgaaatacaagtagatactatattcttaatttgtatagattagcttgttttttatttggtaagagatagaaatatctctttatcactactgggaaaaatagaagggagctaaagataaaacattaaatatatgctatttacctggtttcagccatactaacattagagaatacttgtggttatattcagttgtaattgtggtgactatatctgtgtcctctaccccttgaatttcaaagtcgtgggtggaaatgttttcaaaacgattggctatcttattaaccaagaaaacaagagccttctgagaccctgtcgcaatttttccctttagaaaacgtttcctgacaacatatttttgtgggaaggcaaatggttttaactcctgatattaccaagttattcttccaagtaaacagcaagagtatgctgcatatgtataaaaatctatgcattgttacatgtctagccttagtagaattagtgtacagaagagaaccaccacaatttagactcttgtcaattacttcaatcaaggaacagctcagtggttctactatatattagcagagataggtattataattacaagaaaatctggaaacgtttcaagtttgtaagacagaccctaaatgcttttcttgttaccataggtttatgttatttttataatgaaattcctgtagtattttcaggttaatatttttaacaactgtattagggctgatcattttgtacagctgtaggggtgtggcaaataatggaagaatgactggacaaagaatgccttgaaagttctgtttcttgtttgtttgcttctccttagatcttttcactgacccctttgttgtaagtctaagcactagaccacatatttgcaaaacacttatgacattcaagttttcaaaggttactattatttagaaacttagtaacacatggaagaaggagtgaatgaaggtgaaagggaaggaaaagaagacatgatgcaaaaaccaagtggaggcygttacagtatactttctcatgtatgaattataaaagaatgtttaaataatgacttgaytcattgtgaactaacaaatgtatttttgttttgcagaagtccacaaaaggaagataggataccaatggcagatgagtattatgaatataagcacataaaagccaaactgagactattagaggtcctcatcagcaagcaagatgtggccaaaactatttgaggttcaggaaatgttatgatcactttcacccatgatataaagtaaagtttattttcctctgccatccttgctaagtagttttgacacaatgaaaatggaagcactttagtggtagtattagctgtttttaagaaggaatagcaagtttaattatatacaaggagaagggatttaaacggggggaagaatacaacaggtagccatataattgggaaaaaattcagtgtcctccatgccaagcagaaaactcatagtcaatacaagtatttttaaaaatgtctaatattttatcaaatctaaataacatagctaggacacttgttagggaaagtttatttagtatccaaagactgtttatgttgatgtatggaaaagagcatgattttaaaaaatcaatcataggaggaaaagaaattcgcttttcaagtaggaaggaatacagctagcaagaaagcaatttatttgaaacttctaatggatttttgagtgataaaacatttactaccttgtcctttaagtctgctaggctctcagtaccctaaaataaactagattgtgttgctattttttttctttctctataaaaataacacattattttatccgttatttgaaattttacatttctggttaccaaagttcattctgatagcatgtactttgtgaattattatctttgtctataactgacagatgtttatattaaaataaaatattgtattaaaaatttaaaataggtattttggatagatatgtgtctgtagtatataatctaatgtgtccatagtattattgctaatcttttggtttactataagatgatataactattttttcattgggaatatacatttttcttaatgttccaacatctatactttgtaaagtcaaaacatttcccatgagctgtagttattcatccttctgtacaaaatgaaaagtttggaaattgtttgccctgataycttgaaaaagaagccagaatatttatttgcttcatcaacttcagtgtatatcattttgtgttattttatacgaaaacatgtttattattttcatttttgtaaaaggaagtaaaaggtcaacattttctctcatgtaccaaccttgtttgtatttctattttctgtaatgtttaagtatgatgttgaagaaattcacattctcttatagtttggatgggaagactattgactatttcagaaacagacttatttcagaggcttattgttttctctgtatttacctaatattttataacttttatgaatcagaataatgtccttcataaatttgtttaattgaagtcatctacttctaacaggacagatacacaactatttgaggtttacaaattacatctttgataagggaaatggtttcgtgacatgtacacagttgctattaaaatgtaactctatatattctatatgattgtaaatattttatacaacaatacaaataaaatatttttctattatatttattatgttgaaacacagtagttgtttcctgttagctaatataaataacataaataacactgtcaaacaagaagttggaagtgctgacaattctaggcttcaagatttaactcatgctgcaattacaccctttcatgcggtttggagttatcccaatatttgttcagtagattaaaatgaatgcatatttaaacaccatttataagccattattgtgtactttgctaaagcagtctatataactgttttgttatgtttggcataaaggaaacataaaaacattgcagcatctaggcaataaagtgtcaaaaggagaacttaacttagggtatttcatcattgaaagtagtgggaggggtagggaataggaaaacactaaaatggttctgaatgaaatttggaaagtggtagttgtttgttttggtgacagtggcatgtgcatgcttcagtggaaaacatctggtgataaaaatggacaacagaggaccaatgctcctaagggaggaaaaggggctgagtaagaataagaaaagtgggcattaacgtccaacactgatattacaggttttgcagctgggatctttctttgcatttgcagtagacaaactcatgagctgatgaccagtgatttctgccacggtgcccasagaaagatccacagggtcagtgtaaatgacttctaaaatgacatcctgggcatggtggtaaaccagcaccccatcttcttctgtacaggtcaaaaatttattatccttagaatttagttgaggaaggcgctgcttacaaaattcatctcctggtgatcccacaggagcaataacaagaatcacataatgataagcagtgtacatacagtagaagtccccaaagtataagttagtattggggttaaaaagtttttctgcggcaatctcaaacctgtatcttccataaggtgaatcctggggtggctttccagtattgaattcagtgctgcagctgaagaagatgccttctaattttccactgataggagagccatggctaccactgttatccttgacagatggctgcatagcattcccatgatgttctctgcaagagaaaacaagtggtcactgcttaatacaatagtggtaaacccactgatttatatatttgaatggcctaaaagtcaaacatctactgttaaaggcctgaatacctctcttactatcagaataaggggacaacatcttttgacatattacctatagatggctgtattctagctttgaccttaaggtaaggatgagctgctacaagccttggagactttgtattaaattaacataataatgtaaatttcctggccagaaaaatcaaactggaattagaaaccttacaggtaaaatcacacatacattaagtgccaactgggtttcagaagtggctttctgaagagaaaactgaactaaaggtattggttaaatatattgaatgtttctttaaagcatgatagatttagtcataaaatgagtgctgtccatttatactggcacaaaagcgttgtgttttgttttggctttttttttttttttttttttttttttttttttgagacagagtctcactctgttgccaggctggagagcagtggcacgatcttggctcactgcaacctctgcctcccaggttcaagcaattctcctgcctcagccttcagagtggctgggactacaggcatatgccaccatgcccagctaatttttgtacttttactacagacggggtttcaccacgttggccaggatggtttgatctcttgaccttgtgatccgcccacctcggcctcccaaagtgctgggattacaggcatgagccaccacgctcagcccttgttttggctttttaacccaaggacagtaatcaggttatttctctggcattttgcttaaaacagtgctagttattcccactttacctcacccccaaatccattcattctccaccacagtcctccactgtgatctgggactctagcattcagttccttatcccttggccacttccatttcagttctaccaatgtgaggcaccagcatatatagagtaggaggaggtaaagctttgggtatgtcttcctgtatttcctccacgctttagggcattgtggttctggcagggctgcattcttcataactatgtatctctgactactgctgctgctggatgaattcctattccctttcattcccgtgaagagtaaaacttttcaagtcttgctagtgctagttcttggttcctttagcatcccctatttgttaccgtaaccctgactacacctctatgaaggggtagttttgttaaattctctccagaattccccaagtgtgctgccttcttttttttgttgtttgtttttttttgctgggtccctgaccagcatgacttgggaagcaaagttcaagctactactcaagtaagggaaagttcccccagtcaacatgcttcttaaagagtttatgggtcagtgaaatgcctggatctgcctctgaatttagcagcaatgggtctcgaattctaccacctgaaaaccacctagggagcttattaaaaatgcaaattcaaggaaagaccaaaaaattgtcacagttaagagaatgaggaaacacaataaataaatgtgtgatatcctggatgtgaccctatacttttacttgtactgtgcttttttctttctgatgttccaggtttccttcttttattatttccttccttcctgtttcagaaacttcctttaggatagatatgctgttgacaaatccccttagttttccttcatctgagcatatcttaattcccttttattattgaaggatattttcaccggatataggattctcagttgacagtgctcgttcagcatttgaaaatattgtgtcactttcttttgctaggtaatttctgatgatgatgtcattcaaattgttttatttttccttatacataaggtgtcttgtatctcaccactttcaatgttttttttttttcctttggcctgcagttttcagtttgtaatatatcttggcatggatttctttgggtttatcccatttagggttttctcagcttgaatctgtatgtttatgttgtttggcaaatttgggaacatttcggctattaattctatgaatactttttcagccccaccctctttgtcttttccttcttgactttaacaacatgaatattagatctgctatagtctcacatgtccataagactgatatatatttttcggtgagttttatctctgttgttcaatttgcgtaatttctattctatcttcaagtttactgatttttttctctttgtcctcttgaatctgctgtggaatccatggagtctatccagcttttgactttacttactgtgtttttatgttccaaaattttcatttaattctttgtatcttctatttctttgctgcttccgtttttatgtgtttcaagtgtgttagtatgtgcttcttgaaccatttttatggtggctgcttaaatatctttgtcagataattccaagatctgcattattttggtttttgtatctttgattatcttttctcattcaggttaagattttcctggttcttggtgtgatacctgagttccatttgtatcctggacattttaagttttatgttattatattctggatcatatttaaatctagcatttttagcaggcctcctcctgactatctaccagtgggtgaagagtatggggtagtcacttcattgatgtcagatggggctaaaagtccaggtttcctactcagtctccggtgacacagggtaggagggtcagttactacttggaggaggtaggagtttaggctcccactaagcctgtgctaacatactctagatcagagagagaaggggtgtctcattagtacttgacatgtggcttcacacactatgagggcaagcctcattttctttgggcagtggtggaaaatccaggctccctattcaggcttctctgataccaccctagcagaggatggaaggagaagggtgtccccttacagatgtgagaggatagaggtctaggttcctcacttagccttggctggtacatgagggactacggtttgtttgtttttttcctatactgtttgcctggggtatggtggttattgtctaaaaggtttctgtattcaaagtcatctcagtctctttcccaatcctgtgggtaaagggaacatactttctggtgttctttatttcttttttgtctgtgctcattggcacagacaaaagagatatctttgtatcccattaacatattgaagtgctcaataatgactgtttcttgagtgaagagtaaacaatagatagatgtgggcgaaataaggaaaagagaatctacccatcttgtccctgttcaaaatttctcgcccttgttacattctcattaacaaaatccaaatatctatgatatgtgtcctacatggatctataagtgcaattacatgaaataataacagcaacatatatataaacagaaaatatgtactagaacctacactttgaggatatacaatttgacaccagaggtagaggaattcctacacatgtctaccaatctcagtgaattcctgaaacccttcagatataaaaggagttttaaggacaattagactacctagtgaatatgaacaagaggtaagaaagaaagtggtgttttcatttggagtatgggaaagtaatgttcatttaggaattcatttctagaggaagaggtcaaaatgagttgatttcttatggactgagtaagtatttatccagtttttcataattcaaaatggattataaactttggaaagtgtatccagtaattgaaagtttcctttctattcaagcattctgaataacaagatgatatttaaaatggattttaatcaaggaaatgtgtcttaattagagttaatgacaaaaagaaaatcaacatccatggaatttatgtctactactttttaataaggcttcttaaaaaagcaatgttgaaaaattataccactctgtggaaagtatatttatttatacgtactgcaccaagacatattttacatggattttataactatcattatggaaaacttaacaaaggtaaattttcttgttagtaaacacagctttcatactggtagctgggagtaaaatcatgcaatatacacaataattatccattttctaggcactctgtctttatttatttattcttggaagcatttttgaaaacagatgaagcaaactttagattactaaaggacctaaaaacaaaggccagttcccatctaagggacagagaaaaatcacagagagatactgccctccagtggccacctaaaatagatattggcaatgttccaggaatataaacctaaaatcaaagatgtaattatttattcttttgatgtatttcttaccaaagacaacagaaatatggaggggttttttttgttttcaaattttatgcgtaacaaatacagacagtccctgacttatgatggtttggcttacaattgtttgactttatgatggtgtgaaaatgatgcacattcagtagaaactgtactttgaatgttgatcttttcaacactttttttttttataaaatagactttctgttagataattttgcccaactgtaggctaacgtaagttatctgaaaatgtttaaggaggctaggctaagctatgatgttttgtaagttaggtgtattaaatgaattttcaacttgatattttcaacttacaatgggtttaacaggacataaccccattgcaagtcaaggagcatctgtataaagaaacaccttccttgctaagtctatatggtcattgccaatccacaactgacaagcacaataatttatgttatatctatcagtctgtactctctaaattaggtgaatggtatctaccaggaaatatatggactctagggtatataccaattgagaaaatgaaggactaaactctgtatttataagatattcaaacaaatggcaggaatattttttcaccatcaaaatatataaaaatacattctattgctaagtacttaatttgaagaacacagatgcctacgtgtgttcttctctctctgattcctgttgcattttccacagcttgaagctgatttaaatctggaaccatggtcttcaaacaaacaaatacaaagaacacaacaaagtttcctaaatatttttcatacatagtcctgtcaacttaagaatgctttagagtctgaagtgaagcttttaaaatgataaattatagggaatgctgtgtaagaagttttacaacctatatagcatttgccattttaaaagccttagtgagactaaggcttttaaaacacaaaacagacatctggctatttattctcttcaaattttcttctacaaatatgaaagtgctgtaaatataaaaactacctgcaggatagagttcttttaacttctcaggaactgcttccagggataaacataggctatcttagaaattctagtaaaatcactagaatttaaaagtaaacaaaggagattatcctcatgataattaattcaagataacagctgatatgttttggctgtgtccccacccaaatctcatcttgaattgtaactcccacaattcccacatgtcatgggaggaacccagtgggagttgattgaattatggggagggggaaatctttcctgtgctgttctcatgatagtgaatgagtctc

SEQ ID NO: 6898 - DNA, 83222 bp, Homo sapiens
atttccagtaatatgttgaatagaagtggtgggaatgggcattcttattttattcttgatcttagaagaaaagctttcaatatttttttttttttttgcgacggagtctcgttctgttgcccaggctagagtgcagtggcgtgatctcagctcactgcaagcttcgccttctgggttcaggagccattctcctgcctcagcctcctgagtagctgggactacaggcgtccaccaccacgtccagctaattttttgtatttttagtagagacggggtttcaccgtgttagccaggatggtctcgatctcctggccttgtgatccacccacctcagcctcccaaagtgctgggattacaggcatgaaccaccaaaagctttcaatttttcacgattaagcatgatattagctatgggcttgccatacatagtctttactgtgttgagatgcattccttcaatgcctaatttgttaacggtttttatcttgaaaagatgttaaacattgttgacttccttttctgcatttactgatatgatcatatggtttttgtcctatagtctgttaatatggtatatcatatttatttatttgtatgttaaatcatccttgtgttttaaaatcctcaatacattaaaccataaagatagtctaaatatgaaagttctcagtttttaagaagttatgaaactatttccataaatttgtactgtaaaattaaccaaatatgctttcttaatgtcgttttggtgtcctacagtaataatatcctaacttttgggggtgctttatagttcgtaataatacttttatatgcattatgttacttgatcttcacaagtcccaatacttcttgagtcaggacaaacaatttagaatatttggattgctttcaactgtgtttctattgattatgagttttcctttgcccttccatttacaatagggcttaggaaaagtttccatagtgttatgagaggaaataagatgcactcatttattatgcattttgtggagtttgtttctgtttggttttggttcttggcaccctctgcgagtcataaaatccttagttgtgccaggggttgtgggtcattttattatgaataagatagacctatggactagcctaccaaaaggactgtgtagcctactttgataaaatcctaggctagctggagcaatataactaaatacattcgaagtatcggagttcactaaaataattcagcaaattgtcctaagtatcttctctttgcaaatactataatatgtgcttaaaatctacagtatcacaggagaaataagaaatgttcacagaagtgatacaggatttttatgtctttgcaagctcagaatatgtgagcagagcgatattattgtcaaaaaaactaatgggctcctgggctgcattacaagatgtctggcacacacaacaaagatggtgttactctactgtgctttcttttatattcttattatatttccacacctggtgtgtttacctatggactcagaaaaattggagttatctagaagagagtgtgtagagtgacagagggactcaaaacaatgggatatcacaaacatttgcaaaaaccgtgagtatttaggcagatatttgaatatatatgtataataggaaggattattattctgtatcacgaacaaatcggaaaattaaggcctttgtagtgctcttataggagatatgtttgggctcagaatgcgaaagactttggataacttcatgaggattttaatttaatatttattaggagataaataacttcttgtcaagggctttgacattggataaggtattgaattagatatatttaagtccctaaaatttgattctgattcttcatgtacattaataacttataaatcataacatgatgtctgtaacagaactataaagccccacagaaatacaacataaaggtttttgacagagggaatcatttcaaaagaatgtagcatacgagttggggctcggatgattggtaggattttgattgtaatagcagacatctcaagctaatgattaagtgatgttgagtgtatggggattgcaactacactgcaatttaggtacaaaaaggtagaattttcattttgtctaaactgattcgatcatcttcatgaaatctcagtcactgacaaacgggaggggaaataatgtgtttttattctaacccagaaacctgggttcattcagtattttaagcagttccttaaagttcaagtttattacgttaagaccctcagtctctaagatttccacctttcccctacatcctattttagatagtatctggaaatatcagatatccctagataccattacctgaggcattgggacaaagggtcatttggtttgaacaggttcttctgcctcctctggtctctgaggtgacattcctcatatgtctagttgcttctggtctttcacttgaagttggtagctagagaaactcatggtctgtgcttcagggccttgcggccatctctgacggacgggtctcaactctttggtactttagacatccctggtctagaaggtccactccatagcctttgctaaagtgtcaccttgctcttttaacaaaaaacttcagggaagattggatagctctcaactcaaccacgttctgagtactgttggagccaagagaacacttccgcttagccctctgaaggttaggtgaaaattactgacaagaggcagatgaagaggagaaaaggcatacaaatttatttgatcatagctttacatgaaatttgaacaccacatttccaacataagccttcagaatgaagaccaaagacacagggaaaattgaccattttaatccttaggttcaacaaggtatgaacagtcatgaagaaatatgactggacaaaagggatatgacctaatactaatagattgagtagggaaacccagaaaggcctgtctgtctagattcttcttgacctgtctgagcatgcacttcttccttttggctatgtggcagggccctctctggaatgaggatcttatgaccttcagttaaacaaggtaggtaagataatttctttatggccagtttttacacagaaaagcagaagaaaaattagagtaatattttcagattttatggctggctttggggaaaaggaattgtggtttctataacccacgttggggaacagggattctagtttcttatagctagcctcaggggaaaatgagactgagaggctgaaggtcagaagatgagaggaaaaacttttacttctgaggtttttttttttttttttttttttttttttttttttttttggggaggaggggagtattgttttctgagtctcaacagtacatagaaacttacagcactctggaaagtcaatgcctaccctgtctccgccctgttcaaggttactggaatgtggttcctgctcagcctgatatcttcccagatatctgagaattgggaaagtaatttctctgtccttgagttttcccacaccaatctggatatttctaaagccacaacccctcaccctacatcttcagggtgggaacagtaaaaatgtttctggtgtctttcttgagctcttctacccctttcccgtaattctccaagccaaagagaataggattttcttctactttacctacttcatagccaccaccttccttatatcaatctctgactaaatccttcatactggactaagataccttgtctttactatgggagaaaccctatcatttggtccaccaggcctagccttgatatgttgaaccataaacaaatttacattttatgtcttgacaatgcctcgatttgaagcctaaaaactcgatttaaaaaatcctatatttaatatcgaaagttaaaaagtaaatatttcttttgtattttttatacaagaatccaaatcctcagcagaaaggtgccttggattgattaagttgtatacccagaaagtgacattaatacacttcttgaaacattaccctttccgattacacaaatattctagccgacaaatctgatcatgctaatttcctatttaaagcctttttaataatttctcattcccttaagataaaatcattttggagatcttcctgaccatctaacctaggttataaacctcgtgcgtgcttctacaagctcccatacttcctctttcttaacacccatcctacttttactttttcaatatatatctttcttgataaatttgaactccaaattttcaacacatagcacagtgtcctggacataggtgcttcataaatatttgcatgagtttgaattaaatgcatgtcgtatttcttacttgaaaatcagtaaattgttattctagtttacacagttccttttttttgagatttataaatttgagactactctaaaaaatgaacccactgttgggcttacaataccaatttctagttctacagagccaggctttcgaacacagaaaattcaccagtaagtactttcttgtcatatcctttgacaggtaataatttaccctctccttggggacacccctaccttaagacaagaattctttcaaacttcaaaaacatccatcttcattaataagttcataatgaagacttttcactttaagatgcctaattatctttcacagatatttatgaaatttcaattgtgccaagatttttcacaggcttattttactttaagctggtccttccatttattgaagcttcaattaattagacttcatcatgttatagctaaatggatgtgactagaaagagcagcatacagacatctatgtgtaaactgttacttgttggttaacatttatgtttgaaatggaaaatcaataaaagggaacttatattaatttataagcacattaagaaaagaggggacactatttttgatcccaagatagcaacaaaactaaaaacttttccaaagaagcaaacgggaacagaggtcaataggctgtgacctctattttatgtttaaaacgtttgcacatccactaagtgcactgcagaatcttaaatgcaattaaaatcaatgggcatacaagttatagagtagcttgaggaagcacaagtcaatcttcattagctattgtagcaaagattccttccaaatccatgggagcaggtgctgtttatactcccttcattgacgcccagaacaatggcatagggtgagcattgaatacttatttgctacgcgcatgaatgaatgaagctacgctgcgaaggcagactgcgtggctgctggtcccgtggctgctggccccgcagcatgtctgccgccttttcagcaggcttgctgcatctcctcattccctcacctttctggcagtaaggagttcccacgtttgccccgcttcagtgtcgtggactggcaaaatgctgtctctaaacccctccacgcctcaggtaatccgctcatttctcacacagacgcagctgtttccgaggaatgtccggccgagcccgcagggtgcgggcagcgagtatcctgggaccttcaggggaggaggtggctcccacaccccaataccgtacagagagtccgaagagtccgggcccttatttttccaattcttggtaaacaacaaacatgctcgccctcgcctccccgtgcagacgcctcagggccaactcgggcttcgccaggcaccgagagcagacagaagacgccaaatggctatcaccaggagagagggcgaggcagccgcgcggcgtatagcgctcgcccttcccgcgcgctcggtcgcccgacgcctcacgcgcgaggttgccttggcagtggctggagggcaggtgggggcgcgtgcgcgcagaagggcgggggagggaccaccgcgcgccagcaggtgggcgcgttctcccgcgcgcgtgcgcgcgtcgaagccctatacatcacgttccccgagagcagcgtcccctccccgccgggagcgcgcgcctcccatcctcgcgccgggtcctgctcggtctctcagagccgcacactccgcggagctcctgccacagccgtcgccttcgcggcggctctccagccccgcgcctcagcctcggcgccgcatcaccgcgtcccaggcctccttccctccctctgccactccccctccctttcccgctcttcttgcccacccggccggcagagagagcctggatacgaagcaggcgggcttcagagtgggttggaaaaatggaggtgccgcgcctggatcatgccctcaacagccccaccagcccctgtgaggaggtgatcaaaaacctcagcctggaggccattcagctgtgcgaccgggacggtaagagcggccgggaccgcgaggaaagggacagagttcgcgccgaggcgccggggccactctggctccgccgacgccgctcgccagggcggcagggtcttttgttgtcccctctgtgcaaataaatgcagatgtgggttaccctccgcccaccgccctcccctcaccccagaaacaaaaggaccccggggctcgcgccttggcgcggaaagtagccgtccacaaccgtggcgcccttcgccgccttcgcccgcctggcccggacgagggcgacgttcccgctcgcggctcctgccccgacgaggcgtttccgatctttgccgcagtccggatttcctgggtctctgggcactgaaggggaaatgccctcgggatgtttctagcaacccccttcccccaacacacacacactagttggcattctcttccagaaacttatcattttcttttttaaacctcccatcctcagactccccaaattaacaagtctttttagcctcttggattgggattaggatgacagtttttcagtgagggcgcagaaaaacagtgcatttcagcaccaaggacagacacaatcttcatggttcctgggctctgagtcagactgtcgaaaatattggcctaatatatgtgctgtgattcagactttgtggcgagtacgtaccattgcgtgttgatattatatcgtttattctgttgttgaagttggcaggctcctgtggaaggaaattgattgaatacaggtctgagcgttgaagacataagctagtgctgtgtgcggtgtggttagttacagtgcttctgggttagctggactagttagagtctgctactttagtaatgtggtacaaaacttcatttgtaaagaaatcatttgattagtaattggttggccgaataattgtaaaattctacatctgacaaaggaaacacagttcacatgttgttaagagggccccaaatacttttgactgtaaatgaaattaatgtttaactgtatatagaggtaatgattgtaaaacatgtctttaaccaaagttatgtacagatactaatacgctcacagtaaggtcataaaatttatcagcctaatccaaatagggagcagaggtcttgtttccaaagtcatttaaatggtaatcacttggttacgcattgctattcagcacgtttatatcaagcaagcaccgaatttgtttattactaaattttatatttattaatataaatttatatttaataattttgaaaccagaattcaaactttttgaaaccaaaaccactttaatttctgatacaggtgtagtatatgaataaataaatacgtttgcaaagacagcttgtatttcctttattcttagactgttttagtcaccatggtagtaagtgcacatatttatggtatctaaaaacatttatcattttggtattccatatgtaagcttgcatgattatagactgtaaagattatttttaataacgcataggaagtcatttggattttagtttagacttttatgaaatgactttttgtaatgtaaccattgcaagttgtaaatatttttattttcttagggttgagagaaacacaagactaataaaagtagacttcatttttatttattgcaatgataaagcaaaagctcattcttgtactcaatggaattaggcattcattgttgctcttcagaacccagtaatctcaatacttaaaaccgcatttaccacgtgtttcaaagatattagggaaaatttaaactttttaatgaagttcacagagttaagagagtgcaaaaaataatgctgtatttactgtgatcccctagaggagtagctattttattctggtattattttttagttgtttcttttcaaattaggaatcccacaaaatgaacaaattatgtaacatttaattttggggagggtgctggcactaagtaacatctatgaaaattactatttgcagacttccaagtaatttacatagactaattaaatagggttttattttataaaatagtatacaccaacaaatacaaagagctaactcttctactagaagatgtataaaatttggaaatactttgtttagagatgttgttaaatgcttaacttattttgttatcctatcttacatgtcaattccaaaaatattaacttggttggcttcaaagggataatttagggggaataatgtcgtttgtttttaatagaacagcatatgaaatgttgcattaaatttgtcaaacagaccttacttagcatcattttgtattgagagattttcagctagttgctttttactccctttgcttccctcctttcactttctttccactcaagtctcgttattttacttctgtaactatgtaacatagaaaaggatgtggcagaatatgggacagaagatctattttgtgtttaagtacctaataagagctatatttcataatttatgatagaatacatttattttgtttgctcttttctcactttcttttaatctactgttaatttggtgatgaaaaaaaatgagagaaacattaattccctggaagtggaataaaatagaataggggaaagtatagttatgttctccaatcagagatatttttaattttataatgttttcatactgtatcaaccaagagttatgcctgctggtgaacataactgtatatctctcttatgtttcattggatttttttgtttttgtttttgtctgtcacttgcctattttcctatgaattgatgattacattataaacaataattcaatttttttcatagtttctaaaaatatttaatagtttctgaagaatatgggttagagtccacatggtcatataattggcttttcaattaagcaagacagttacacacacacacacacacacacacacacacacacacacacacactacctcatggattgtcttccctaggcatgtgtactttgtttgccaggacctggtccttgcccaggtattactctgaaaatatactgtaaatccagaggtttctattcctattgcaagtagaagagtatttttgtttctccatctctgctgtgctgaagtatactcaaattgcatacatgatgtacttttattatgacttttcaaataaaatgaaagagaaaatttcttgtttggaaacaataatatgggagcccatttacagtttgatagatacttcagaccttcactgacctgtgacaagacaaaacagctcccaccccacacacagaattttatattacttgtgcttttcgtcttttaatcatatatatacacacacacacacacacacatacacacacatatataatatatatatatagaaaaagtatatatatatatatatatatatatatatatatatatatatatatatactttttcttcctcgttgaacaggaaagatttatctacatgttgccttacatgtatctaagctgcctccagctttgttatagtaaggaagaaaatacataattaatttgttttaaaacatttaaatctaccctcaaggcttcgtggctttaacaaatattattttcatgagtccggcactttatgactgtccagatacggtataaaccatagggtttatgatgtagtcagcaaggaaacacattggaaagaaattacacagaagctaacagatttccttgtctttgtctctaacaatacttacgtggaaaaaatggaggaaaaaaagattttatctcttttacatatttaaaaagataaatttctttgaatgttgagtttatcaaatttatttaaattataagtcaattaagacctcacttatgttattggcatgtggattaaacaaattttaactttggaaataaaaagtaacaaatgcttaatagcacagtgatgttagataatccgtaatggcattttctgaagcagacatctaagaggagtacccataactgttaactttaatagtctttattacaagaatgtaaggtagtcattactcagtctcagtgacatgcagtgtagcatagtgataataccattttagatcagaccacccctgttagaatattggctcttgaaagccgtgtaaccttaaattacttaacttgttttagcctcaagctttcttatgtaaagtgggtataataccaatcctgtaggattgtttaaataagtaaagcattactttcatagaatttaccagtgttgatattaatacaaaatagacagtaataattattattctgaatggaatattgtccacgtaacttcttgaattgaaccactgctttttaaaatttcttttttgccagtgtctaggtccttgtcgtttttcttaatttcagttacatgttataggaaatcacttcaacttcatgagtaattactataatctgtaaattctgaattttaaagaatagtaaattttgaaatcacaattatagtactcttatcttttacttctcttttaccatcctatcagtaatatctttatcaccttagccctaaaaattgttttcagtttctagttcaaatctgtcatttgctatttttcatgtggcttgtaaccttgatggttgctttgtttaggtatttgccttagagcccttctctgttcttaatttacaatgtttttctttattaactttttccaaggatagacatgtactaggacacgtagcatgtagattaatttctttggcccaaatatgactatagagatattagtgagtatgaaacaaaacaaaaataaaataaaaactaaaagaaacaaaaaatttggaaaccatcagattgtattaaaccaattcatattcttggtagggttctaattcattcccagggaagaccaggaagttactagagcaagttacatcaaaggatatgtgaccagactccctccagtggtagaatgactgatgtgttgtatgtttaacgctggcaacttactttgttgcctaggtaggcccggtcagaaattcactctctatagaatgctatttagacaacattcaaattacttggttttatctctactgatatttcttcctaaattaggcccaatgttgctttttcctctaacttatgtgagtatactttcctgattacttttatatttcatcctgggcctcgataataacagcagctatgtcactcattgcagcaagcataaatccttctactttctggttttccttctctgcttttctttagtaaatgcataatataagttttgccttgtagaatgtgcctccttcttggatttattttccatttctgttatattgctgtatgtgaatctttttatcctttattaattaaattctatttttactataaaacctatacctcctttttaaactttaaaatatttcattattagcattattattattgagacggagtttcgctctttcacccaggctggaatgcagtggcgcagtcttggctcactgcaacctccgccttctggtttcacgtgactctcctgcctcagcctcccaagtagctaggattacaggcacccgccaccacacccagctaatttttgtgtttttagtagagatggggtttcaccatgttggccaggctggtcttgaactcccgacctcgtgatctgcccgcctcggccttccaaagtgctgggacagtagttaaaccgtcctttgagcagactatattttatatacatacatttgagagtaaaatcagtgtttggagacaacttaaatgtatagaagaataggacagtctgagcagaaaaaaataggtagaaagcttcagcatattctgtatatgttaagggtagkgactggaaatggtatataagaaaccaaaaaagaatcatgaggaattcatgatgattgaaatttcaggcaacatggaaagtgatcaggagtaacttcaggattttaagtctgggaaatctgaagaatcattgacaggaaaggagaaaaagagaaataaaataatttttaaacatcctgatgacattaattttttacatctcagattttaggagctggtgaatatccaaatatgtcctaagcacttttctagaggcatatctctctcatagatattgttttaccaggatgatattatatatactgctttgtcattattgtttcagtgtgtttccccatgagattacccactgatattcttttraggcttttttttttcttcattctcactcctcaaaggctatacaaggtctgatgataatactgtgagaatcagtacaatataaaactaaccacttaatagtttagagaggattgtgaaatagtgatttttgagctatctccgtaaagagattgttgaatctaaggagacatttttgagagattagtataaagcaaaaagaatttttgagttatatgaagatgtttcaaatctaacattaagagaacccttagaaacttaaaaagtcagcaattcttgtgttctggggaaaagagttctagaatggggagaattgctcatagaaacatatattccactagggagactggaaattaagtgaaaagggaaaggttaggatgtaacttcagttttacagtgacttttaatgtgctttgtatctcaccctttgagggaaaggggtggtcacatccaactttaaacaacaaagatgaaataaatctacaaccaggtttgttacaaatgtaactaagagctctgtattttgaagatgctcaacagatgtgmgttgaaccaagaacgtcatacttggaattgtcgttagttttgtttgttatgttatgactatttgagccatgtagtggctcatttaaaaggggctgctccgtggggattgtgcatatacaccatttgttgtagtggttgtggcaactagtgtaaatagatctgtatttttgttttctatagcctgtgggaatgttgctctctaataatagtatgaaaagcttatagtttccttagacatatgccaataaaaacaaggcataaaagatttttcagtatactctgatttttttgagaaatagtgtctcatcttccatgaatttgaatattggtgaatctctcagtctttaacattttaaaagctgttgataaatgccaacaagarttatgtaacttttgatcatctactgtgcaataggtccaataggtccttaatggctgcattttagagttatatctgtgatgcagaacaggggcgtgcatgttatgttccctgggcaaaatccataagcctgctacctgttttggtaagtataattttattggaatacagccatactcatttgtttacatactgtctatggctactttcttgctacaacaacagggctgagtagctgcaacagaccacatagcccacaaaccttaaaatacttattgtctagacctttataggaaaagtttgccaacacctagtgcagaagattgagacatgagttaatctctyttgataggagtaaaaatattgcaaagagagtttttgggaaaaaactgtgtactcatcttacttttatatatttccagggttttgcgattaggcgagtcaggcagagagatgtagagacttgaataatgttatcaggcagtaagttagttctgtatggagtcagtcagagatgggtggtcccctataccattgcatctgataggcagtgacggaaacaggccctagttttttttttttaattttttttattgtattattattatactttaagttttagggtacatgtgcacaacgtgcaggtttgttacatatgtatacatgtgccatgttggtgtgctgcacccattaactcgtcatttagcattaggtatatttcttaatgctatccctccccccctcccccaaccccacaacagacccaggtgtgtgatgttccccttyctgtgtccatgtgttctcatggtttaattgccacctatgagtgagaatgtgcagtgtttagttttttgtccttgcgatagtttgctgagaatgatggtttcaagcttcatccatgtgcctacaaaggacatgaactcatcattttttttttttttttttttttttgagacggagtctcgctctgccacccagactggagtgcagtggcgggatctcggctcactgcaagctccgcctcccaggttcacgccattctcctgcctcagcctcccaagtagctgggactacaggcgcccgccactacgcccggctaattttttgtatttttagtagagacggggtttcaccgttttagccgggatggtctcgatctcctgacctcgtgatccgcccgcctcggcctcccaaagtgctgggattacaggcatgagccaccgcgcccggccgaactcatcattttttatggctgcatagtattccatggtgtatatgtgccacattttcttaatccagtctatcattgttggacatttgggttggttccaagtctttgctattgtgaatagtggcgcaataaacatacgtgtgcatgtgtctttatagcagcatgatttataatcctttgggtatatacccagtaatgggatggctgggtcaaatggtatttctaattctagatccctgaggaatcgccacactgacttccacaatggttgaactagtttacagtcccagcaacagtgtaaaagtgttcatatttctccacatcctctccagcacctgttgtttcctgaccttttaatgatcgccattctaactggtgtgagatggtatctcattgtggttttgatttgcatttctctgatggccagtaatgatgagcattttttcatgtgtctgttggctgcgtaaatgtcttcttttgagaagtgtctgttcatatcctttgcccactttttgatggggttgtttgtttttttcttgtaaatttgtttgagttcattgtagattctggatattagccctttgtcagatgagtagattgcgaaaattttctcccattctgtatgttgcctgttcactctgttggtagtttcttttgctgtgcagaagctctttagtttaattagatactatttgtcaattttggcttttgttgccattgcttttggtgttttagacatgaagtccttgtccatgcctatgtcctgaatggtattgcctgggttttcttctagggtttttatggttttaggtctaacatttaagtctttaatccatcttgaattaatttttgtataaggtgtaaggaagggatccagtttcagctttctccatatggctagccagttttcccagcaccatttattaaatagggaatcctttccccatggcttatttttgtcaggtttgtcaaagatcagatagttgtagatatgtggcattatttctgaggcctctgttctgttccattggtctctatctctgttttggtaccagtaccatgctgttttggttaccgtagccttgtagtatagtttgaagtcaggtagcatgatgcctccagctttgttctttttgcttaggattgtctcggcaatgtgggctcttttttggttccatatgaactttaaagtagttttttccaattctgtgaagaaagtcattggtagcttgatggggatggcattgaatctataaattaccttgggcagtatggccattttcacgatattgattcttcctatccataagcatggaatgtttttccatttgtttgtgtcctctcttatttccctgagcagtggtttgtagttcttgaagaggtccttcacatcccttgtaagttggattcctaggtattttattctcttagtagcagttgtgaatgggagttcactcatgatttggctctctgtttgtctgttattggtgtataagaatgcttgtgatttttgtacattgattttttatcctgagactttgctgaagttgctcatcagcttaaggagattttgggctgagacaatggggttttctagatatacaatcatgtcatctgcaaacagggacaatttgacttcctcttttcctaattgaatgcagtttatttccttctcctgcctgattgccctggccagaacttccaacactatgttgaataggagtggtgagagagggcatccctgtcttgtaccagttttcaaagggaatgcttccagtttttgtccattcagtatgatattggctgtgggtttgtcatagatagctcttattattttgagatacgtcccttcaatacctaatttattgagagtttttagcatgaagtgttgttgaattttgtcaaaggccttttctgcatctattgagataatcatgtggtttttatctttggttctgtttataggctggattacgtttattgatttgcgtatgttgaaccagccttgcatcccagggatgaagccgacttgattatggtggatgagctttttgatgtgttgctggattcggtttgccagtattttattgagtattttttgcatcaatgttcatcaaggatattggtctaaaattctctttttttgttgtgtctctgccaggctttggtatcaggatgatgctggcctcataaaatgagttagggaggattccctctttttctgttgatggaaatagtttcagaggaaatggtaccagctcctgcttgtacctctggtagaatttggctgcgaatccatctggtcctggacyttttttggttggtaagctattaattattgcctcaatttcagagcctgttattggtctattcagagattcaacttcttcctggtttagtcttgggagggtgtatgtgtcgaggaatttatccgtttcttctagattttcaagtttatttgagtagagaggttcatagtattcactgatggtagtttgtatttctgtgggatcggcagtgatatcccctttatcattttttattgtgtctatttgattcttctctcttttcttctttattagtcttgctagcggtctatccattttgttgatcttttcaaaaaaccacctcctggattcattgatattttgaagggttttttgtgtctctatctccttcagttctgctctgatcttagttatttcttggcttctgctagcttttgaatgtgtttgctcttgcttctctagttcttttaattgtgatgttaaggtgtcaattttagatctttcctgctttctcttgtgggcatttagtgctataaatttccctctacacaatgctttgaatgtgtcccagagattctggtatgttgtgtctttgttctcattggtttcaaagaacatctttatttctgccttcattttgttatgtacccggtagtcattcaggaacaggttgttcgtttttcatgtagttgagcggttttgagtgagtttcttaatcctgagttctagtttgattgcactgtggtctgagagataatttgttataatttctgttcttttacatttgctggggagggctttacttccaactatgtggttaattttggaataggtgcggtgtggtgctgaaaagaatgtatattctgttgatttggggtggagagttctgtagatgtctattaggtccgcttggtgcagagctgagttcaatttctggatatccttgttaactttctgtctcattgatctgtctaatgttgacagtggggtgttaaagtctcccattattattgtgtgggagtctaagtctctttgtaggtcactaaggacttgctttatgaatctggatgctcctgtattgggtgcatataaatttaggatagttagttcttcttgttgaattgatccctttaccattatgtaatggccttctttgtctcttttgatctttgttggtttaaagtctattttatccgagactargattgcaacccctgcctttttttgttttccatttgcttggtagatcttcctccatccctttattttgagcctatgtgtgtctctgcacgtgagatgggtttcctgaatacagcacactgacaggccctagttttaacttgaaatctagccttcatataaataagtttagaaagaaatgctatatatgcacatgcgtttccaggtacacttataattctatcaatagatatgttttaaaaagtgtcaaatgtagtgtgaactttgagaaatatgtataattatattgatgcatattacaaaaatttatgtaaatatcatattattcctttgaaaccaaactctccttaaaaaagagtcaagatcatattcatctttctgtcttccatagtctatctcaagctgtctgtaaatgaccctcttatttttcttttttaatttccaatctgttacagtctgaaacttattaagaacattgaaaaagaatttctagaaaaatgaaattaaaatgatacaaatgaatccaacagaagtaaaattcactgttaaattgctttaaaagtttctaaatgcttaatcctaatttttatatttaatttcatcacagattgatagtttgtagactattgcttgtgggtagaccacatttttaagtagcaccagctagaggaccatgccattctattcttgttcaatgattaatttataggaacttcccttagccagttaagagtctactttgttttcttttgttcttctacttactatttttattatttatttttacatgcattccaactttaggttctgaattaagaacaggaaaaaaggacacaaaaatggatataacttggattctgggttcaaaggatttaggaagacaatttattttgagaatcaatatatttaagtagataattataataatatttgataaatactataatggagtatagaagagaaagtggttatttctatcttgagtctaaggagcaacattttattgagggttaaaagtaaaataaaaatttgccagaagaaaaagtaggagaggggtatttctggctgagataagagaataaacaaaggcttaaaatcatgtattctgggaatgcatagcatttggtattgctggaggaaagaagtgtgcctggtggaaaattaagctgaaagctagttgcagctagctaggttatgccatgattaggattttggatttattatcttagatttcaaactttctaatttgtggagaacgtttgttttattatataacattgtgtaataagtaraagtagcattttattgtgtaattgtactataattttatacgtacagcatttttcaaatagtcaatcagtggtatagtgggaatttaaattagcagctatgcttgaaagttgctattttatatcagcttcagcatccactatatttctgtatcttatttttattgcattatattttgaaaattctggttcatacaaataagtggtggcaaattgtaatgtttttaagtcatctggccttttcaggatattcttcaaataaactgatcaagaccaaaaagagaaatattcagatttttgtcaaagtagaataatgaaagaataaatgtttcatttgagggtaagtgacagaatcgattcatcagtcatttcatttttcattgtttgatgataaaattctgtatcttgtatcattctgagatatttattgataacatttttaaaactcatacttttctgctgattctgttaaaatttcagaacagttgatttattttccttgcatgatgaatcttaactgtaagaatcaatttcatttctgaaaatttatttgcattataagcttggtaatattgtgactatattgtcaaattgaatttcttcagcttattaaagagctggataatcaaattggttttccctagttacttatatttgaaagatacttatcagagtttttaaaaattacatttagaaagtgtttcttgtttttcgaagaatatttataccttgattcaggacacccagctaagtttggtatgaaaaatgagctttgaaattttctgttcttaaccttacaattagctcagaaaaaaatccccgacttcagtgtaaaggatagtttaaatgtgattatccaaaactattttttaaatatctaaatatctaatccttattagtgtataattactacttgatgaaatctggcaacaacttttacaggagctaccattcctgtgattttttatgttatctattttcctcaatatagttgtctcaatatttctgacagtttagttagtggtgtgttaaaaattggtttagacattaacattttcttctccattgtgtattgttttacgatttctgaatttacctagttaaaaaacttgtgcaaaagcaaatgtagagatctgacccatatatattctcattgagttaaattggaaagatcttacataatctcagcatttgaattaactaggtatatgygatgaatattttttgtattacattttcaggtatgtaccaatattttgtttcagttttttgacagcagctcactcatttaacatttgttgcagtatcaataatgcaacatttgataaggttttctctaattgtgtatgcttttgttcataggtgataactttattctgattacattttagtcattagatttgcagtaacttcagtcactgtatgttttactgaaaatttatggaattgtcagcaaccatatcactattttgccaaactttgttataaaaaacccaatgaaaagttgtcagtttttatcactacaatgtaagtcttaatgatagatgactatcattatattttagccttgagtgactattcctgagagcttccagcatatttatttcattttgaacatagttgccactgtggtcaatatatgctgaaaactcaacaggtactaattaatagtaagacttaatatatcttgagtcaaataagtaacaacatatccattttaaatttgtctgttatttcctgttttcagccagtttcatttmtagttttagagataattatttcatttcctatactggaaaaagtataactttatcccaaacaagaataactttatcagaatacaattagagaagaaatatgcaaatttcatagtaaactcttaatctgtttaagagaggaagggccaaacagttgaaccagagccttacctacaactaattgaactctgcattcaaatacataatgtctttgtaaaactttacttgagcgtatacttgctggcttgaatttaaacaaacacacatgaaacagagttacaccttttattagcacatggtgccattttgtgcactgaggtagcaggcaaagtcttcttttgatgtttacccaaaataacagaggacaatttaatatttgctatttgtattacagtttaaaaatagttttaaaataattaaaaaggaagttaaatgataatgtttgatacacttctcagtcacctctttattaaaaaatatttaagtcattggtcagtggttctcaaaatttatcacctagacggcttactaaaatagattgctgggacccatcccctgagtttctgattccttagatctggatggagcccaagaatttgcatttctaacaaatttctaggggatgttggtgttggtgatccagggtccagacttacagaagcaatgcttttggtagcatgaccaaagaatttcttaggtggggaagagatattggatatttgttgtttagatacagtgttctgacatccattggatgaatgaactgggatattgaactcaagagagtgtaactacctaaatggcaattatagataataagtaggatttttaagacaagatagataaaaattaggggtggaattaaacaacatttctgagacaaaaatctgttaactttgtgatcaaactggaagtgtggcatatgaaaaaggagttgttgaggatgactaaatttgctagatttggagatggggtacattttgataccagcaaataaaataggaatttttaactggggggaatattaaagagtaggcttgaagacaagcgattacagttctttctggaccagttagatttcaatatctgtggaatatctagatggaaattttcagaaggctgttagaaattttcatctgtgtctcatagggagagagtttgagaataaagatgaaaatttggtagtactctctgagttattttctcttgttatatttcttcttcatcaagtgttcttccttcatcttccagtcagtctttgagacccatatgaggtttttcaactgctcattagagtgagtacattagaatgcttatgccttttgtgtayrtgtgtggtgtctgaaaggatcatttggaaattaattactttagatataattatatttggtaggttgtggttatttggggcagttaacatggaagaaatacaattaacctaagctctgtgcttgatagatttctcccccttattttgactgacaagagaactaagtgtatgattatctgtgcttactgtagaaatacactggattaattttttccccttaagcaacataatctgtgttgcataaaataaatacagtrcataaaataaatgaactggtggaactcaaattagcagaaaaacagtgacagtgaagcctaaagaaaaattaaaatcttcagcaaatctgtgtctaaggctttcaaattgaacacatatgtccaagattttctttttgaccttgaacctactaattttcatgtttactagggtatttgttgagtgctaggctacaataagacatagtctctttttttaaacttatttttcttgcagactctttttgtttaarcttagataaaccttccattttaataaatatggttttytagtttttgtataacattttcaagctgtgctaaggctgaatatttgagcctatttctatatattttcttctggtgtaattcagtatatccaatgttaatttatgtggtgcttgttagcttgatacaacttttttggctgttatttttggtgattaaaaaaggaagccctaatgactaaaaaagcagtggttctggaatttgctgtttatactacttgttttgctaaaagctttacatatttacattctaatgatcaaatttacagaattgaaattaagcttaaaataatgataaacgttccaaattmcaaatacaatttagctacttcttctagaacttttgttttgcactatgtattgtagaagtatttctttacctatatgtttktttttttttttttttttgagrcagtcttgccctgttgcccaggctggagtgcagtggtgtgatcttggctcactgcaatctttgcttcccaagttcaagcaattctcctgcctcagcctcctgagtagctgggattacaggtgtgcaccaccacacccagctaatttttttgtatttctaagatatttatttttctaagagcttcatatggatccaccattgaatgttttcctttgctaccctcataatagtttcaagaatgttttccaatttcttttcctatagtgttaatacttttctattttaattttctgacatagaaacaccacctagtttcactctaatatgataatattttaatgagaattttaaatatatttccctgaatgcatgcatagtgctatttagtgcagataatgtgtgtgtatttattttcattgcactgtgaaatgctgatgtgccatattttaaggaaatctgaaatatctaaacttagaaaacacattaatcagggaatagttattttccctgcaatagtgttctctgtcagttctgcagtgttcttcgttgtttcyttcagaaggatttgacaaaaaggcaaaatggcagtgaaatgtgataccaactaatttgtcttaaaacaacggtttcttaagttatctctgaaatttttatgagaggaagtatatgctagacattggaaattcaaagatccagcatttttaacttcacctatttataggccatgtcaaaggtagctaaatcggataatttattgacaattttaatagcatgctagacagctgaatttctggcatttacctgtgagtgtagaaagcttgttgcccagcatttctgtcaatgtttctttatattttatttgagcatacagaattcttgtgaaatgtcaaaaacattatttttaagtaaaaaatgacccctgagaaagaaaagtgtggaatataagaaaacagaaagggggaaaggatttgttaraagtgttttacaaaatatttgcactgactaatgttattatattaattatgtaatttaaggtattgtttaatttattttggtgctagaatttaattgcttttaaaatgacttttattctcacattatcattaagagtctgtgaatgcattgtgtaggggatgaaaatgtctttccttctcatcttaggttcatggctgaggccacataacaaaagactaacaagagaaaagcatacaaatttatgtaatataagctgtgcatgacgtgggagccttcataaggaaatgaaaacccaaagaaatgggtaaaacctatgtattttttaatgttaggtttgatgaagagtggacagtcatggagaagtataattggaagacaaacgcgtatgatttcatggtaataagctggtgggaacttcacaagacttgtttcttcagattcacctctgtgtcctatgtcttcagagataaggatattcttttcctccaggtatagggaggccatctctccagtgaaggtcttatgacctgcctcaggggagaagggtaggagaaggagtgaccttcctgcttctgttgttttctcaaattctttcagctgaaagtattttagggtaccatgtctcgaaacccattgcttactaacatttttctgttgtattctactacttggtaaattatatgctttaattgtttttacatatgtaaagactttgaaaagtatcctttgtaaatgccatggttatattgtaatggtcttcaagtgatgtttatgaactccagaaggcataatagataatcaattggaccatggaataaagtaatagaacttttgttaatgtttatttttatattatctagaataagaaaaagttttattaatgttagctatagagcttaatacttgatatatcaaactgtcacatatactctatgtgcatgaggtacatgtgtataattggtatatgcttagtgttttgtacatacagatagtgatgtactttcccagcctgatgtacccattcttgtgtgataccttttccaactgtgatagcccttaaaacaaagtatctaaataaactgaatttagaattggtcattgaattgctgtgtcacaaaatgttaaaccaagtttatcaaaataacacatattcatatatttttagtaaaatgtttttattctgaagtagataaaaataaaatatttaaaattattttgtattttataattttaaattgctattttgcccagtctataatgtacataatatattagtatatatatatatgtataatttataaagaaatgactgcacttatgagtacactgtcaacatttttttttttttttttgagatagagtcttgctctgttgcccaggctggagtgcagtggtgtgaatctcggctcactgcaagctccacctcccgggttcacgccattctcctcacacctcagcctcctgagtagctgggactacaggcacccaccaccacgccaggctaattttttgtatttttagtagagatggggtttcaccgtgttaggcaggatggtcttgatctcctgaccttgtgatccgtccgacttggcctcccaaagtgtggtattacacgtgtgagccaccgcgcccggccaagtacactgtcaacattttttatgcaggggtatgagatgaaaaaagttttaagaatagatttgkattatattctatttttgtacgtcttgctttacacagcaaggtatatctgtaataaataaatccacccaatgtattcaaagatggatttcattacacaattatatactctttattgtcaaaaagatttcttaaatgcgtattttaacgtgatgttgtatatagcaatttagatgaattccctgggctctggaggtaaacagttcaagataatttttagttatgtatatgaaatctcaatctaggtgctcatcaaggagctaaaacaacaccacaaatttagaagcatgttgctattcactgctacctatgatagtcctgttttccaaaagatgttctcattatcctccccagtttctcaggcattgaccttcaggggcattcttcacataaaatattaagataaaaatcccttgaattctatctcctcagtggtctgatcttattttacatcttataactttataactgagtaacaaaatttcctttatgatctggccatcaccaatcttctgttcctccagtcccatcttattctttctctgaaaataatcttttgagaataagttttcagtacctgtcttccctgttaagaaaccttaaaccttaattcaaatgcaacatatatatggactttcatgaacctctttttagggtcatttgkttttggcatctgttaccctgttgtgcaaaacttcacctggctgactagtaagctctactttttttttcctacattttgtgagttttctttccaaaatttcactaagttcaaagtgaactgcttttccatgtataatgcatgtctgtacctttgtgccagggccagcattccctgcttttactcttctttaacatttataaccatcttcttctattctggctgtgctaccatatttattgtctttgagtcaacactttacttttacttatttaggattgtgtatgttggttacaattaccaacaattccagggcctactttcctttacatttggtcttaaaatgttgctacctgttttcattgacatctaccttatctccaaactattttgtgctcctcttayatattatttatattcattactttttattttaacctaggtcaaataatgaagtttcatttgtgtgtttttattgccagctactcagggttgtgcttgaggcttgatttgcatttatgtcctcttgtggtatggagcacagagatagaatgggcacaggaagatgaacttagatctctttattttttttaagtatttctaaagcagtaatctttttttattattattatactttaagttctagggtacacgtgcacaacgtgctggtttcttacatatgtatacatgtgccatgttggtgtgctgcacccgttaactcatcatttacattaygtatatctcctaatgctatccctcccccctacccccaccccatgacaggcccagtgagtgatgttccccttcctgtgtccaagtgttctcattgttcaattcccacctatgagtgagaacatgcrgtgtttggtttttttgtccttgcgatagttttctgagaatgatggtttccagcttcatccatgtccctacaaaggacatgaactcatcattttttatggctgcatagtattccatggtgtatatgtgccacattttttttaatccactctatcattgatggacatttgggttggttccaagtctttgctattgtgaatagtgccgcactgaacatacatgtgcatgtgtctttatagtagcatgatttataatcctttgggtatatacccagtaatgggatggctgggtcaaatggtatttctagttctagatccttgaggaatcgccacactgtctcccacaatggttgaactagtttacagtcccactaacagtgtaaaagtgttcctatttctccacatcctctccagcacctattgtttcctgactttttaatgatcgccattctaactggtgtgagatggtatctcattgtggttttgatttgcatttctctgatgaccagtgatgatgagagttttttcatgtgtctgttggctgcataaatgccttcttttgagaagtgtctgttcatatcctttgcccactttttgatgggtttgtttgatttttttcttgtaaatttgtttgagttctttgtagattctagatattagccctttgtcagatgagtagattgcgaaaattttctcccattctgtacgttgcctgttcactctgatggtagtttcttttgctgtgcagaagctctttagtttaattagatcccatttgtcaattttggcttttattgccattgcttttggtgttttagacatgaagtccttgcccatgcctatgtcctgaatggtattgcctaggttttcttctagggtttttatggttttaggtctaacatttaagtctttaatccatcttgaactaatttttatataagatataaggaagggatccagtttcagctttctacatatggctagccagttttcccagcaccatttattaaatagggaatcctttccccatttcttgtttttgtcaggtttgtcaaagatcagatggttgtagatgtgtggtattatttctgaggcctctgttctgttccattggtctctatctctgttttggtgccagtaccttgctgtttttgttaccgtagccttgtagtatagtttgaagtcaggtagcgtgatgcctccagctttgttctttggcttaggattgtcttggcaatgagggctcttttttggttccatatgaactttaaagtagttttttccaattctgtgaagaaagtcgttggtagcttgatggaaatggcattgaatctataaattaccttgggcagtatggccattttcacgatattgattcttcctatccatgagcatggaatgttcttccgtttgtttgtatcctcttttatttctttgagcagtggtttgtagttctccttgaagaggtccttcacatcccttgtaagttggattcctaggtattttcttctctttgaagcaattgtgaatggaatttcactcatgatttggctctctgtttgtctgttattggtgtataagaatgcttgtgatttttgcaccttgattttgtatcctgaggctttgctgaagttgcttatcagcataagaagattttgggctgagacgatggggttttctagatgtacaatcatgtcatctgcaaacagggtcaatttgacttcctcttttcctaattgaataccctttatttctttctcttgcctgattgccctggccagaacttccaacattatgttgaataggagtggtgagagagggcatccctgtcttgtgccagttttcaaagggaatgcttccagtttttgtccattcagtatgatattggctgtgagtttgtcataaacaactcttatcattttgagatacatcccatcaatatctaatatattgagagtttttagcatgaagcgctgttgaattttgtcaaaggccttttctgcatctattgagataatcatgtggtttttatctttggtcctgtttatatgctggattacttttattgatttgcgtatgttaaaccagccttgcatcccagggatgaagccaacttcattgtggtggataagctttttgatgtgctgctggatttggtttgccaggattttattttggatttttgcatcgacgttcatcagggatattggtctgaaattctcttttttgattttgtctctgccaggctttggtatcaggatggtgctggcctcataaaatgagttagggaggattccccctttttctactgatcggaatagtttcagaargaatggtaccagctcctccttgtacctctggtagaattcggctgtgaatccatctggtcctggactttttttggttggtaagctattatttactgcctcaatttcagagcctgttattggtctatttagccattcaacttcttcctggtttagtcttcggagggtgtatgtgtcgaagaatttatccatttctcctagattttcgagtttatttgcatagagatgttcatagtattctctgatggtagtttgtatttctgtgggatcggcagtgatatcccctttatcattttttattgtgtctatttgattcttctctcttttcttctttattagtcttgctagyggtctatccattttgttgatcttttcaaaaaaccagctcctggattcattgatatttcgaagggttttttgtgtctctatctccttcagttctgctctgatctcagttatttcttggcttctgctagcttttgaatgtgtttgctcttgcttctctagttcttttaattgtgatgttaggatgtcaattttagatctttcctgctttctcttgtgggcatttagtgctataaatttccctctacacaatgctttgaatgtgtcccagagattctggtatgttgtgtctttgttctcattggtttcaaagaacatctttatttctgccttcattttgttatgtacccggtagtcattcaggaacaggttgttcgttttccatgtagttgagtggttttgagtgagtttcttaatcctgagttctagtttgattgcactgtggtctgagagacaatttgttataatttctgttattttacatttgctgargagwgctttacttccaactatgtggtcaattttggaataggtgtgatgtggtgctgagaagaatgtatattctgttgatttggggtggagagttctgtagatgtctgttaggtccgcttggtgcagagctgagttcaagatctcttcaatatttgctttctcattttgttagaggctgtcagttcttgggccaatcctaatgtggtatgatgattttgagtaatcagagtgtaatgaatccttcctaattctagtttcagccattgaataatgaaatttggaattaaaataaaatgcttactaatgatttatcataattatgaattaaaatattacaggtgaatctgggccttgatatttttaaagttataaatatatttgaaaccttacttgaagattagaggtttatcatttatttttaaataatctatcagagaaatatataggaagttctcctaactgacttgtggtagagttaggggtcataagagtaaagcaaaagaatttgaaggataaatagaagttaggaaggaaaagttgagaaaatatatgagctattgggagatagtagtaaacagtgagtgaaagattacataggcagtaatagaccaggtataaggaatcactccaacgaaggcttagtagtgactggggttagggtaagattgagagttagatgagattatgttagagaygaaaatatgccaggtcttgaaggactagtttaaaatattatcccaaaggagtgggggttgaaaaattacccaccgggtacaatgtctaatatttcagtaatagggtacactagaagcccatcccccaccgttatgcatatattatccatgtaacaaacacatgtaccccagaatctaaaataaaaatgttttaataaaatttaaaaatataaaaagttattccatgtcaacttttttacatgattagccaaggaaaaatttgaagcattagagtaacattgtcttcacatgaatggttgggaggagaatttcaacaattattgttcagataattaaacctcaaataactkttgctgaatgacttgggtaatttagatatgtgtgtctgtgcttccttattctgaatgataccacttttataccattttggtgtgcttatacagctttgagtgcttaaatagtattacattttataaccagaattaaggaaacagaatgttaggcctaggaagtgccttcaaaactatttaattcaaactttctgttttccagttgtgaatatgtgggattattgaggttaaattacctgtctaatttcatatagctattaaacagcagagtcaggatttgaaccagtttgtccatttctgaagctcatgctcttaactaatatcattctacaaaataaaatcaataagtaccttagacatgatttttcaaactgttttattaatatattttttacttagggtttaaaacctactatgtagacataataatttagaaggtcgtaaactgcagcacccataacttctgcagaatatagtgattactaaaaaggccatagattgcaatctacccatctgacaagggctaatacccagaatctacaaagaactaaacaaatttacaagaaaaaaatcaaacaaccccatcagaaggtgggcaatggatatgaacagacacttctcaaaagaaggcatttatgcagccaacagacacatgaaaaaatgctcatcatcactggccatcagagaaatgcaaatcaaaaccacaatgagataccatctcacaccagttagaatggtgatcattaaaaagccaggaaacaacaggtgctggagaggatgtggagaaataggaacacttttacactgttgctgggactgtaaactagttcaaccattgtgggagacagtgtggcgattcctcaaggatctagaactagaaataccatttgacccagccatcccattactgggtatatacccaaaggattataaatcatgctactttaaagacacacgcacacgtatgtttattgtggcagtattcacaatagcaaagacttggaaccaacccaaatgtccatcaatgatagactggattaagaaaatgtggcacatatacaccatggaatactatgcagccataaaaaatgatgagttcatgtcctttgtagggacatggatgaagctggaaaccatcattctgagcaaactatcgcaaggacagaaagccaaacaccacatgttctcactcataagtgggaattgaacaatgagaacacttggacacagggtggggaacatcacacaccagggcctgtcgtggggtggggggagggaggagggatagcattgggagaaatacctcatgtaaatggtgagttaatgggtgcagcacaccaacatggcacatgcatacatatgtaggaaaccagcacgttgtgcacatgtaccctagaacttaacatgtaatttttttaaaaaaggccatagataatggtaaattgctcatttagatgcatgtataagggttattttccgtttactagaaagggagtaaaagaagcctaaaggattacatgttgttacgggaatttacatcaagatcaaattccatgggaagtctttatgtagatttagaatataaaggatttatagaatgtatgtagggtttaggccaataaaccaagtttctgaaaactttatataaagaactattataagtaaaacaaacaaagtataaagtatgttttcagcatgtagaaatattaaatttaaaatcttctrtcctgctaggagactagaccttaagttaacactaaaatattatgaaaattgatgactgctgccatttaaattctgtgttactattagggtagatggtawtgaggtgacagttcataaccattctaaacagtctaagtgattacaagttaaataaagttatattttatcatgtaatgagtctgtgtatgatgacttttaacagaacccttttttgtgggagctttaaatttctcctgtcagtcraactagaattattttaaaaagaaagaggaggaraatttcagagtcctggattagtgcaaatttagtttggtttcattcccatgtcaactaggataactcaaggaccagattctcagtttatgttgattttgttcccttttgtgtgtatgtcctttttattttaagtgtgaccttttaacattggctktaatctgagatttttttttcttaacatattacttattgccaacattggtagggagtgccatctccactatgcttttagtcatatctttatatttttatgcttccatatgtcagtttattcatgtgtttatcattcactcaacaaatatttattaggaccaggtgctcatttagacaggatcagtagaaaggagtctcataaagtttttttttttttttttttgagacaattttcgctcttattgctctggctggagtgcagtggtgtgatcttggctcactgcaacctccacctcctggattcaagcgattctcctgccccagcctcccaagtggctgggattacaggcacctatcacctaattttgtatttttagtagaaacagggttttgccatgttggccaggttggcctcgaactcctgacctcaggtgatctgcctgccttggcctcccaaagtgctgggattacaggcatgagccactgctcctggcctcataaagtttttaaaagaacatcaagggaatatacttaaaagtttcactaaaataagataaaattatcccagttccttgtggacactgtattcatgttatcctgatgtaacagctttttctcatgtgacattctagatcatgaacgtgagattgattatgtgtgggttggccatgggaccaaaagggaagtagttgattcatctgttttccacagcattttctctttaaaagaaaattacaaccatgtttttctttcaccaaccatgagatttcctaattgttcacattattaataattgtttttattctttaaagttcttaatgtagtcacctattttgtgaactcatcatgtaaagcatatttgtgagtatttttctcttgtatttatttcatgtgccctggtaaaagaatgatataacatgctagttaccaatatgctagagtattacagagttttatgtgtaacctatgttcatcatcctacttcagctaatatttttcaggcagaaaaagcagaaaaagcttttcagtagtatgtgggccggagtacactggtcctcatggcacagtccctcatggctacttcagctaatatttttcaggcagaaaaaggcagaaaaagcttgacttctggggtggcagcaacaacaatagggtttgaattagtattaagccataagtcttagcctgataatttttctggctttcgtaatataaattccttaatactacttgtaagtttagcctgtcttcggtcactgggaataattctgcatctgagaacagatactgtaaggaacttaaggtcaggatttcatggccttagcactgagtaattcttggcattactttgtcctagtacattaattctagtaattaaactcttattttaacttctttgatcaagcgccttcttatatctatctctagcaattgaatcctggtgttttcatctataaatgaatctatcccttattttcttgcccaaatcctagtccctccagcctaaggttctattttgaataccaggattttgcctttcatggtttctcatgggtagaactgtacaacttgctggtaagcctccttgatacaaacaataacctaatagcctgatctccttcccattgccttttgttagactacttatactgcgtgtcatactttgtctactgaatgggacttctgccatttgtaggctgtgaggtctctatctgtcttgattatctctcccttcctattatttggagttctcgtgattggcatcgctgcttcaaaggtctttctaatctctggatctctgcaaactgactcttaatggtgtaacccaacgtartctaactgagtctgtttttacagtagccagctagaaattctggaaattctagaaattctggaaattctggaaattgcctagttctggaagtccaacaaaccaagcaaactcagtgaatacaactcatgttgtgtttagacgcagaaacatttagaagcacatttatttaattcaaatttgtatattggtacataagggagacagaaaattgtaaaagtacataactaaaagctgttatgcatttcttttttattttttagttgtttttgaagaacttacatccaaacagacaagaaaaggataaaagcaccattggttcatggcaagttattacattttaagtgattaactgtaagtgcacttcatctcctgcactagtcatgtttttgacttccccaaattatggaaagtgtgacatgcttcattaacataatacttaacattacaaatagraaaagatgggcttctttagcaaaacaatacagtaagagggcccttttctcaatgaatgataggctaacacaacagagatctttcagttaaagcagaatcttaagtaaggtacatagctaatgtaaggtacattttaagtaaggtaccttagctgtatacattacttaagaatatcacagaggtggctggcaagatggcagcataggaacagctccagtctgcagctcccagtgagatcaacacagaaggtgggtgatttctgcatttccaactgagatacccagctcatctcattgggactggttagacagtgggtgcagccaacagagggccagccaaagcagggtggggcgttgcctcacctgggaagcgcaaggggtcwggcaactccctcccctagccaaaggaagccatgagggactgtgccatgaggaccagtgcactccggcccccatactacacttttcccacagtcttcgcaacccgcaaaccaggagattccctcaggtgtctctgccaccagggccctcacagtgtaaacaaagccaccaggaagttcaaactgggcagagcccaccgcagctcagcaaagtcgctgtagccagactacctctctagattcctcctctctaggcagggaatctctgaaagaaaggcagcagcggccaggcacggtggctcacacctgtaatcccagcactttgggaggccaaggccagcggatcatgaggtcagcagatcgagaccatcctggctaacacagtgaaaccctgtctctactaaaaatacaaaaaattagctgggcgtggtggtgggcgcctgtagtcccagctacttgggaggctgaggcaggagaatggtgtgacatctgggaggcggagcttgcagtgagccgagatgcaccactgcactccagcctgggtgagagagcaagactctgtctcaaaaaaaaaaaaaaaagggcagcagccccagtcaggggcttataggtaaaactcccatctgcctggggcagagcacctgggggaagggacggctgtcggcgcagctttgatagacttaaatgttcctgcctgccaactctgaagagagaagtggatctcccagcacagcactcgagctctgctaagggacagactgcctcctcaagtgggtccctgacccccatgcctcctgactgggagacacctcccagcaggggtcaacagacatttcatataggagagctccggctggcatctggcggatgcccttctgggaggaagcttctagaggaaggaacaggcagcaatctttgctgttctgcagcctctgctggtaatacccaggcaaacaggatctggagtggacctccagcaaactcgagcagacctgcagctgcggagactgaacgttagaaggaaaactaacaaacagaaaggaatagygtcaacttcaacaaaaaggacgtccacacagaaacctcatctgaaggtcaccaatatcaaggaccaaaggtagataaatccatgaagatgaggaaaaaccagcgcaaaaaggctgaaagttccaaaaaccagaacacctcttctcctccaaaggatcacaactccttgccagcaagggaacaaaactggacagagcatgagtttgacaaattgacagaagtaggcttcagaaggtgggtaataacaaactcctttgagctaaaggagcgtgttctaatccaatgcaaggaagctaagaaccttgaaaaaaggttagaggaattgctaactagaatamccagtttagagaagaacagaaatgacctgatggatctgaaaaacacagcacaagaactttgtgaagcatacacaagtatcaatagccgaattgatcaagcagaagaaaagatatcagagattgaagatcaacttaatgaaataaagcatgaagacaagattagagaaaaaagaacgaaaaggaacaaacaaaccctccaagaaatatgggactatgtgaaaagaccaaacctacatttgattggtgtacctgaaagtgacagggagaatggaaccaagttggaaaacactcttcaggatattatccatggagaacttccccaatctagcaaggcaggccaatattcaaattcaggaaatacagagaacgccacagagatactcctcgagaagagcaactccaagacacataattgtcagattcaccaaagttgaaatgaaggaaaaaatgttaagggcagccagagagaaaggttgggttacccacaaagggaagcccatcagactaacagctgatctctcagcagaaactctacaaaccagaagagagtggaggccaatattcaacattcttaaagaaaagaattttcaatccagaatttcatatccagccaaattaagcttcataagtgaaggagaaataaaattctttacagagaagcaaatgctgagagattttgtcaccactaggcctgccttacaaaagcttctgaaggaagcactaaacatggaagggagcaaccggtaccagccactgcaaaaacatgccaaattgtaaagaccatcgatgctaygaagaaactgcatcaactaacaggcaaaataaccagctaacatcacaaagacaggatcaaattcacacataacaatattaaccttaaatgtaaatgggctaaatgctccaattaaaagacacagactggcaaattggaggcatcacactacctgacttcaaactatactacaaggctacagtaaccaaaacagcatggtactggtaccaaaacagatatgtagaccagtggaacagaacagatgcctcagaaataacaccacacatctgcaaccatctaatctttgacaaacctgacaaaaacaagcaatggggaaaggattccctatttaataaatggtgttggtaaaactggctagccatatacagaaaactgaaactggaccccttccttacaccttatacaaaaatatacaaaaattaactcaagatggattaaagacttaaatgtaagacctaaaaccatgaaaactctagaaagaaacctaggcaataccattcaggacacaggcatgggcaaggacttcatgtctaaaacaccaaaagcaatggcaacaaaagccaaaattgacaaatgggatctaattaaactaaagagcttctgcacagcaaaagaaactatcatcagagtgaacaggcaacctacagaatgagagaaaaattttgcgctctatccatctgacaaagggctaatatccagaatctacaaagaactcaaacaaatttacaagaaaaaaacaactccatcaaaaagtgggcaaaggatgtaaacagacacttttcaaaaaaagacatttatgcagccaacaaacagatgaaaaaaagctcatcatcactggtcattagagaaatgcaaatcaaaaccacaatgagataccatctcaagccagttagaatggcgatcattaaaaagtcaggaaacatcagatgctggagaggatgtgcagaaataggaacgcttttacactgttggtgggagtgtaaattagttcaaccattgtggaagacagtgtggtgattcctcaaggatctagaaccagaaataccatttaacccagcaatcccattattgggtgtatactcaaaggattataaatcattctactataaatacatgtgcacacatatgcttattgtagcactgttcacaatagcaaagagttggaaccgacccaaatgctcatcaatgatagactggataaagaaaatgtggcacatacaccatggaatactatgtggccataaaaaaggaacagttcacgtcctttgcagggacttgagtgaaactggaaaccatcattctcagcaaactaacacaggaacagaaaaccaaacaccacatgttctcacttgtaagtgggagttgaacagtgagaacacatagacacagggaggggaacatcacacaccagggcctgtttggggatgggggtgctaggagagggatagcattaggagaaattcctaatgtaatgatgggttgatgggtgtggccagtgtatacctatgtaacaaacctgcacattctgcacatgtatctcagaacttaaagtataattaaaaaaaagtaaatatcacaaataaggcctgatatggtggctcatgcctgcctgtaatccctgtgctttgggaggccgaggtgggagcatcacttgaggccaagaatttgagaccagcctggggaacatagtgagacccccatgtctaaaaaaaaaattattttgaattagctgagcatgttgctgtgtacctgtagtcctagccactcaggagatgaggcaggaggatcacttgagcccaggactttgaggcaatagtgagctgtgatcaggccattgcacttcagcctgagtgacagaacaagggtctttgtttttgttttgttttgtttgagatggagtttcactcttgttgcccaggctggagtacaatggcatgatctcggctcactgcatcctctgcctcccagtttcaagtgatgctcctgcctcagcctcccgagtagctaagattacaggtgcatgccaccacagccagctaattttgtgcttttagtagagatggggtttatccatgttggtcaggctggtctagaattcctgacctgaggtggtccacccgcctcagcgtcccaaagtcctgggattataggcggactctctaaaaaaaaaaaaaaaaaaaaaaaaaaaaaggtattacaaatagttccttttttaagttcattaagcataaatttagctgccttacagcacagcatctgaataaactgaagtactttttaggtcaagtgattttgtttataatttggctttagtaaaagctaatgaaaggaattcatttcttaaagtgaaactcatatttctgatttttacatttcctttctcagagaaggaatgcaatggtttgaatgtttatcccctctaaaactgatgttggaacttaatccccaatgttgcagtattgagaggagggacttttaagaggtgattaggtcatgcgggctttgcgctcatgaatggattaatccatttatggattaatggattaatgggttattttgggagtgggactgttagctttataagaagaagaagagaagacttgaactagcaagctcagccccctcaccatgtgatgccctgcactggtgcaggactctgcagaaagtccctaccagcaacaaggtcctcatgagatgctgtcctcaaccttgtacttcttagcctccgtatctgtaagaaatagcctctctttctgtataagttacccagtgtcaggtattctgttataagcaacagaaaacagatgaagagcttatttattttgtttctgttaaattaagtttagcctaaagctgctttcttacatatttttaagtttggcctaaaggtttctccattcataatgaactgtaatctcattgcatgtataaacagactgtaacccacttgtgtaacaagtagcccagtctcaggcaatcccagcaggcatacttcaaccactcctaggtggacagccattcaaactgtgttcaaataaggcaaatggtcaaccgttaaccaatccagctgtttctgtaactcatttttattttctgcatgtcactttcctttttctgtccataaatcctcttcaaccactcagcagcaccagcgctgctctgaacctattctggtttggggaagagagtggtgggagtctgcccaatttgtgaatcattgctcaattaaactctgttaaatgtaatttgtctaaagtttttcatttatcatttccatacaggtaaaaccaaactgtaattgaagtgtatccccagaaagctatgggacctcttataactaatgatagtcaccccagtcaccccaggattttatcggcttatcaatttgtacaacatagataataaattaatgataaagtataattcatgtaatgattctatttgacttcactagaaaccatatttatttgccaattcattttcgaggtgacagttggttaagtcacattcatattgtctgtcagctcataactataaattttataaattaattggcagacatactctgtatatggttccaaaatatggcttttgcttaataatttgtagaagactatttagaatgtataaggagcyggtaaatatatttggataaaagggctttcttaaaaaaaaaaatctaatctcattttctccaatgcactttcttcagtgctgccagagtgatcctctaatgtagaaatccaattatgtcattcaatggttaccttttgtctgtgttaagtatttactctaatataaacaaaaatttctttgatttttgccccatcttatactctagccttatttcctaccatttttcctaccttttcctaaccaaatcattctgctgcattgcctttaacactccattgtctttgaaagcttgagaatatttataaaaaaataatatttaaaagatagctttatatgttaggataaccagctacgggtatatttactctctgaaatgaaaaatgtaaaaataataaggtgatctcaactcatgtctagtgatttgtaatgggagtcagttactagggatagtagtcaaaactttggtgattataatcaggracatgagctccagccacagaatgtacagcaaagagccaagggctgagattttgggaatgcccactattgaattgtagaagaaaaataatgttgtgyaagttagagttcttggctgaaaatagccaagactagcttgattttaaacaaaaaacaaaaaacacccactacaacatatcagaaagattttaagtgactcaatcagtgttaaagtttgaggagctagattgggaagaaaacaaaggatgaagcatagctataattctgcacaggactagttactatgggtacgaccactagtggcattgtcagtggatactcagcctttctcattgacccttctgccactagaaactccttctatgcctctggaatcttaataattaaaatggtggggtgatatttctgatccatggggggaaagatggattattcaataaatgatgttgggattactggatagccatctagagaaaaaaaatttaattgaaattgataaatgaatttctattccatactataaattccatacagatagtttcagacatttagtgaaaccatacaagcacaaggaaaacatgaatatacatctaaaaatatatatgcttagaatgcagaagatgcttagttatgacacaaaactctaaagccataacaagaaagattgataaatttgattgcagtaaaataattaaagcacaaaaaaagatccctaaaatttaaagtaaaatgaaacaatgtatctgtttggtgacatcatcacacaaaaaagaagtattccaagtgatttgaaaacacagcaattatactgtacatccctagtgacatgtaccctacagaaaaagatctgaaaaaagaaactttaaaaactgtttccagtaataattattggcggttatgttgatggtgttattttgagtctgttatgtgtgtattgtgggattttataaaacaagcaaataagtagtatcctaattctgtcattcctgctccgtttgagaaccagtcatgggagaaaggaaatataaatacaagatggtgttaaattaaaatyctatagtactgaatttgaattagaagtattggtggaactcatgatgagttttctacttaaaaataaaacaatgaaatgcctacttctatcaaatgaaaaagcttagagacaaagatcaacccaataggaattagcatccttattgcccagatgatggtattgaaatgctattttctgccaaaaacaaccaggaatttttgaagaaatggttgattccaggtctagacagggcagataacaaggatatatacatagaacattctagatggatacagataaactgacagtgatgatgaatgtttgtagagaggagaattgagggctgggtgttgaagtaagtagtatacttttcacattacactcctttgcctttttaaatattatgcattgtcttcagaatgataaaacaaaatcattaaaaattatgtggaaagttaaattcttgctcattgttatagtctgtgcctgaaagagcatattacttggggatggagttgacaggatttacccatataatgtgatggcaaaacattgtactgtcatatgtattttttaaatgatagttattaacttctacattgaatctacagaaaagrtcattgccttctaatgggttatcacctgagtagtaaaagaaaaacatgcagtttggtagttcagagtcaactgaaacatttggataattcattatgagactttatgaatcaaatgaataataactaaaatttattttaccagatcwtcaagtggtatttttagaaacatagaagtaatgtcctatttctgaagtcagggagtagactggttcctttacttaagcattcatttattcagtaaatatttgctatttttgacacaatggaaataattgcgacaagacggccatgacccctgtattcatatgtatcttacactctggtgggaaaaacagataacgatataaataaatagataaaaacacctagaaattatggaactgctgtaaatgaaatarataaggaatttatggagaatgtcagtagtaatgggacaaatttactaraatatgtgaatattctagaaggcttctctaagtagtaatagttaagctgaggctaaagggtggaaggagtagctttttaaaaactagaggtaaagcattataagacagacaaccagccttcatagaaaaaaaaaaacagatttttgaaggatttttaaaagatcagttaatctgtattagttggtgaagtccaaaatttatggttgcagcatctgggcattacgttgatgccatttactgaagtacagaaatactaggttagaggaaaagattggaaaggaaaatcaagagttctattttagatattttaaatttgaaatatctgtgagacatccaagtaggggtgttgaacacatttcaaattatgaaatataaaattggaagttgtcagcaaaaaagatcatagattacttatagggaagagagaggaatttacagtacattagccacaaggatcatatggctatttaattaaaattacataaagtttaaaatttagttcttagtcacgctacctattttcaagtgctcagtagattcatgtggctagtggcactcacactgaatttcagcacttgtgagaaacattattgtacaaagttcagtgcttgtttagaaagacagcactggtcaggaaagaggttattgatctagatcctgttcagtttctttgtaactcttggcttcaaagataagaacattcctttcttttggatatcgggaggatcctctggaataagagtcttatgacctacttcagaggaaaattagagcattttttcatggactgcttcagsggagtaaggtgggagaagatcaatgtgaccttcttacttctgctatttcttccagtgtcaaggtgccatactttaggtagcatgttctaaacctcatcgggggtaaaggcagaggagagctggaaagtatccattggatttgccactatgcactttattggtgatggagtggtagaggtagaaactagatttgactgggtttaagagtgtgtagtaagtgaagaaatggagatagcctttggcaggtctttggagaagcttggttatgaagggaagcaaagaaatggattttctgaagggatatagaagtaagggctttataaatttacatatgtatgcatgcttatatatgttgctaaattgtaagcttgaaagcgcaaactatagtctcattgattcatctttgaatcttctggcacttagacattcaacaataatgcatgtctgttgaacaagtcagtcatacttctaactatctgagaaaatagtttgtaatactttactttactattcttggagtgagatactaatcccccaaacttatattttcacatatggagatcactgatttgccttttgataaccttgaggtgttaagtgatagtatactagactaccttttacaaaaacatgttatgtcctgtatttattttgcagtagagacactttttagtcttcaagtgtaaagggaatttgaagtggagaaaaatggtctgatctttatatttaagaagatagacttcaatgtgctgatcaattttttaagcagtgatatgaatacaaatagagcctcaattttagagaaaacattactatgcaatagatcctctagtgtttaaaagcrtatttgataaaaatgggaataaaataaaatgactaatttgtcaataactattatgtatatatttttaagatgcaaatttttgaatttctagtgcagaaaaaatatacctcttgctcatttttctctataatatacaattatagtattgtatttcaaataaagatttgtacttgaaatgttttagctgcttctctgtattctgatatctctaatattcatatattaccactgtatattgcatttttatatttttgcataaatttattgtgtttcacaatgaaagggcaagtgtgaagaaaatatataaaatatattccataataaattatattttataaattattgctcaattctaaaactcaaatttggataactttaatgtatttatgatgattcataaccaaatataaggaaaactgaatgcagattacttcctactaagtagatgtaatagccttctctcaatcttaccttcttttttgagaaacagttctttttaaggatgcttaccagaaaaaaacactttgtctttcatatccagggattcaggtatgctgccagcatacaccttggactaagatcagacttttatactctattcattcattgctactttccagttgaccgtccaaagaaaaatttctaacgktaataatatacgtatacttgacatcagacccaaagttgccagtggcattgctcggagtcatccaagtccctgagctaaggatttgggggttctaactagctgtttttggttttgaacattttgggcctggataattatattttcttcttatagacagggctggatccaggttgtatagtacctgaagtttatacaactttggatgctatatttgggaaaaacaatacaaacttatggatacaaaatgaagtactaggaacaagtgcaagtgatgggtcctcgaagcttaagcttcattatcttcctgatcaattcactcgtcctgttgtaaaagatatcattctcctcatttataaggtgaattacttgagaacaaataaattttactaatttaagtaatctctttagatcatagagctccaaaagtgggagagatatttgatcccaaaaccctgtcagattctaaagtctgtacaatgtagaatgatagggtagaatagaagaatctgtggcctttacatgtactgatagagtgccataagagttctgagagaagagctatctgtagaccccatagtcatcaggaaaggcatttgggaggttgggcttgagattaccttcaaagaataggttaaaatagggctggattcatatattcatttaaaaaacatttttsagtgatcttggtctgatatagtttgagggactctctttagaaaaaagaatacataattataaatattgagtgatcttggtctgatatagtttgagggactctctttagaaaaaagaatacataattataaataaaaaattatgtgttgggccctgaatattaagcttcattaatctcatgataacccacctcatattacaatgtagcagtatggattttatgtgcacaatttattcttttttatttttattttattttatttatttttttcgagactgagtcccactctgttacccaggctggagagcagtggcacaatctcggctcactgcaacctctgcctcctgggtttaagcgtacacaatttattctttttggagagatgtggaatctgtcctcagcatattatatgtttgctttgaaattagctgatgttggccacacacagaaaaataatattctaggtattttgagagactttttgatgcctcataatcatatttggattgtcctgcatatattcmtaaaaataagaaagtgctatttaagtgattaagtaggaagccaaagaagtagagttaggaataaattgctgtagtgtttctgcacatggaagatattctttacgtagttkgatatttatattctgtgatatggtatataaaaatgaagtacccatcaataagtttcctataataaaagtgtctgtagttactcaggtaggaataaataaattaaaatgaggttcactgactagtctctatttgcagagttcatgaagctgctttatttcatacccaaaattgttgtatcaataatagcttttgtaagtcacaacattatgctaattggatatatttgttgataaagtaagaatttatttttattttgatatgaatagtgatcactttttgcagaaagaagttttagacttgataattgatgttattttattttatgcaagtacctttatatatgtcaattacatgaatttgcttgtagatggaaaaattttcaagattactcagtacattaggtgaacaaggatcattattagagagagaaaaagggaacaactttgagttgacatcagtaaggacagatataattttccctaaggcaggtttagaatcatgtagtaatttcacttcaaatgtatartttcctcagagtttctagttaactacatggtattaaacacaaaatacaggtccctactgaagtcatgtaaaaataacaaagggacaggtacatgaaaaagcagacaaatagaattatgcaaacaacttgtatttgttctataatagtaaaggagcagcaaaaccagttcagaccctaagttcaatgtagcttctgtctcctttcacaccatttattgtgctgaattgctaataacaaagtgaataggtatgccccttttcctgttttatttttatttactcctgggtgtctttgttgaggatttaatactataaaatgataaaaagataggcatagtcaactattaaataaattaaagttgatccattctgttttttatcctttaagttttttcaaatcaagaaaaacaaaacaccatgaaaaagaatgggaggtattgacaagttccctcaatttaaaaagttggcagttgagttaaagagaagctgagtgacacaggtaagcctgtgttacatgtcggtgagacatattggaccagaaaccaagcttctctattcctactccactaaaccttggtgtctcattttgtcttcttgcagggaaatattaccagaaaataattcttgaatgtaaatatatatttaatttaatcatgaggtaatggaaaatactgctaactaataataataaattcaagaagcttaagaaaattgcacttgagaaaaaaggtgctagccttaagttttcctacatttggaattggaagtgactttagggaaaatctaatgcagagcagttctattattttacaaatacagaacaatgaagattagttaagtgatttgcccccaaacaatacaaatagttctagagcaactatggtaaggcaggtgtagtacagtggttaggaacctgtacttgaatgccaggcctcttagaataaaatcttctcttttacatcagttatttgacattgggcaagtcatataacctctttgtacctcattttcttatctgttaaaatggggatggtagtaattagtaattgataaatatgataactaaaaaattaaaaattattgtaaaacactcaaattactgtctagctggcataaataagtgcttaataaatgttcctattactaaacagctttgatccaatgctgtatttaaataaatgctatctattttggttaactaagaaaccttttatgccttgatttgcccagactagactagactaaacttgcctggactagactctaatgtctaaaattaccatctagtctttctttttttaatcatataattgtttgatttgttccatatttctgtttaactttagaaaaagtatgttttttgtgtcaccatctgctaaaggccttttcaacttgatttgctggatagttttaatattctttgactagtgaggcaagtgaaaaacaaatttacctcatctttaaaacatgtttaacaaggtggctgtattttatcattgccattgctgttttggcttttattaagagcaatgactaaaaataacattttatttactgttttttagcccatgtacatatattttgaatgatttaactgcataataggtactcagtgagtttcactttttcatttgctacttgtttactagtgcttcggttcacctttagcatcaatgatcacatccatttaaaattgattagacagtttaactttgaatttaacactggatatggctaagagagataagtttttaaataggagtgtgaagccttaattttgtgctgcttctcatgtcagtggaatcagaattttgtgtttcttctatgaactgtggaaatctagagctgtattgtgaaggattagcaccacagagataaacaagttttcctggcttctcataaaagctcaaatctctaaaatccctgaggattgtgaattaactgcatttagattctttcagatattagtgtcttgggcttcagagtctgaagttccaggatggtaatattccttgctattgaccacatagtttgccagagaggaaaacttttcgttaatatttaggtgtcagattattccatatagaactattttgctaatattatgacagttaaatttccatgtcctctayttctaactcctaacccttggagtaatgagaagctgtgagaaagtgttagtatcaggaggtttcagtacccttgtagctggttcaataaatgtagtttcatcattggtgaagaataaaatagtacctcataaaactttcttgaaaaatgaattggaatgcccttaataaagaagtactgtatatggatttcaaacaagcccaggaattataatcacagaataattagagattttaagatccaaaatcggggtgaaatgccatttggatactatggttattggggaactttgcttttttaaccatctttattaatgagattaaaaaactgtaaaaaatgcaggtaactaggaggtgctgtaagtataactgtaagagaaataattcagaaagcggggcttaaggattagatgcatagaaaagaggtaataaaagcgaaatattctttaaaaataaaaatgagagacctgtggaaagaaataatacaccaagcagggtggcaagctataaggttaaaggagaccctaaaggcaggaaattagatgtgatctgcaaagtgatttagttaaaagaaacaacaaaacaaaaaggaggagagcatatttgagagagaagcatgaggtaatttagagattatttatactaaaatatcatcacataaaaattaggacattattacctttttcagtatgtatggatttactcaaaaatacttgaatatatctggacactaatgaatgtcagaaaagtggggggggtttcaaaagaaaaaaaattcattaaagattactagaggcactgatgttctggagtgagttagaaaagttatgcattaattagaccaaggatagagtgaattaataattgcattttatattagtgcattgttaaatcatataacatttattgtctactacatgccagatgtattagatgttttatgtggctgcataacctcatttcatactcatttaccctatgaggaaacaggcttacaggattgttaacatttactcaaggtcaaacaactccatgtagcatagctagaattccaacccatgtctgtctgactagtaggtgctcttagccactctgtaactaatcattgtgtacttatgtatgtgggatayagctatcaacataggaaattcattgggatattagcataatggaggtatgtaatttgtgataaatgttcagaggtttccaaacaaatgcagtttaccttactgtaaattaaacttaaaaatttgtacgggcctttggcttaattcagagatctgcccatggggttctattactttgctctttaactttgttcgatccttcttggatcagtcttgcaattcattcttgtcttttcctgaataacatctatgttttgccctcttttgagtgctatcttaatatgccagcctatttctacctttcttgtgcagggtagcataatttttactttccattatacctcagtcccacaccttgttgtctgtttatttcaatacctaagatacttatcctcagttcctagcwtactttagttctgaaagttggatatccataattgtagtggtcttaaatctgtaaaacacatatggatgggaaaccactgaataatgtaaataaatatgaataacgatgataaaataaaaataataaaaataactgagttcaatgatattaaaaacataagtcagtttaactattttttttttgagacagggtctctgtcaccaaggctagagttcagtggcatgatcatggctcactgcagccttgacctcccccgggtcaggtgatcctcccacctcagcctcccaagtagctgagactaggggtgcatgccaccacacccagctaatttttggattttttgtagagacagggtctcactgtgttgcccaggctggtcttgaactcctaggttcaggtgatcctcccatatcagcctcccaaagtgttgggattacaggcatgatccactgcacccagcccaattgcccttttttatagataaataagctaaggctcagagagactaaatgatgtgaataaaaagtaggtaattaaagaaacatgcaaatctatatttttcttccaagtccatggacttttccgttactatatatcatgctctctcccagtttagtttcttgttgggcttctagtttgaatattgtgttatacgggtgaatgttatgttatatggataataaatactcaatgtataatttcacatggtactgggtcttagacttgtttaattaattcattaattcctaaagtctaaagttaaattgaatgagcttctaagaaaaatgtatgttaacctacacctttgctgattttgatgcccatggagaagagtcttacctagccacaagggaggctgaggtaggagaatcacttgagcctggaggttgaggctgcagtgagtcatgattgtgcctctgcactccagcctgggcaagagtgagaccctgtctcaaggaaacaaaacaaaacaaaacaaaacaaaacaaaacaaaacaaaacaaaacaaaaaacaaaacaaaaaacaaaacaaaacagaagagcaattgaactatatatcaaaagggtttaaaatatcagttcttggaactagtgccaagtcatagagaagttttcattggccttctgttaaattagacaaatccagaaaatttagtgagttcttcataaagttgaatttattcactttaacacattgtattattctgaaattaaatatttctacatttgatgttaaaatataatttttcaaattacgttgtaattagaatatggttttctttttgctcttcacaaaatcaaaacaattctcttatttttgttgaaattttggtagtctgttgaatgaaaagattgagaaatattgactagacctctaaagccatactcagaaagaggagtatataaatctataacataaaaatagtaactctgctatttactcttatctactaatattataataaactgcataagaataatctggtgaatgctgccagaaatgtcaagttaaaaaaccaaaaaggatgaaaagtttaaaagtctgataaaaaacttactgttcttaatatatattaaagaatttccaagtaagatggtacttttgggcatgagcatcaaactatcccctccataagacctgggccaaaatgagtaagaaatgaaaatagagggccgggcgcggtggctcacgcctgtaatcccagcactttgggaggccgaggcgggcggatcacgaggtcaggagatcgagaccatcccggctaaaacggtgaaaccccgtctctactaaaaatacaaaaaattagccgggcgtagtggcgggcgcctgtagtcccagctactagggaggctgaggcaggagaatggcgtgaacccgggaggcggagcttgcagtgagccgagatcccgccactgcactccagcctgggcgacagagcgagactccgtctcaaaaaaaaaaaaaaaaaaaaaaaaaaaaaaaaaggaattgaaaatagaggaaaactcttcttaacaataaaacttatgtaaggattccatcaacattatactccctgagtaatatgtgtcatataatttatccatggaatcccattgtaaaagtttgtattcctcctcctcctcagaaaatcacacagtattgcaggaaaaatagtaaagaagctcttggaagatctgtgctgtcaccctgtgattggatagagtgaaggatggacagctagcaacttcacttggaattttccttgttgccatggattaataattattgaaagcagatatgctaggggccacagaaagtgaagctttatctcctgatggtaatgaggcttacctctaaagtggtaagacacttctccatgggaatcagcaattcaagggaagaattcaaacttagttacaaattgtaactggaagaaaaagtcagaccaggcagaatactggtagtagaaagccagcccctgattagtagattaaccaaaccaagagaataaactaatatgaagtttctttgctgtgattctccatatctctagttcttttttctcttcacagactttaaagtctcttaactagaaaaatgaaacttatgtaactaccccttcagattaaaatctaagaggaaaattttaatagcatcctcttgtaggaaaagaggagatttaagtaggatccatcaatcctatgctagacctaaaaacaagaagtttctaggtcttccatatgatgaaaaaacaaaatgagacctacctaagaaaaaacaaaatgagacctatctatgaaacaattctacagagaaataggtggaggaaaatttaccaataagagtcagaaaaatgacaattctgtgtttttttaacagtaaaactaaattttatagattctgatttgtgttctcaataaaattcaagattgggtttaatgaaacaaagatgaaagattagttaagataataaactaatatataaagagacgtaattgagaacaggagagaacattagaaaattaataatgttatactaattttaaaattccattagtagcaaagagtggaagccacactggaagaaaatcagagagatgggagaaacacttagaatttttctttcagaatgtaaaggaaaagatacagatgaaaataaatgatgatatacatggaggacagaaacagatccaatatacagatactggtggttcccaaagaaccaaactgaataatcaagcctttattcatgtatcggaacaatacaagcaagagacaaaaagaaggccccagtgtttaatttcttcccacagaactgcaccaggcaggagtcaggtggatgtaatgaaaatggttgtggtggtggtggtggtggtggaatcattgctaaggaggagttagagtggagaaaaatgcctcagccaatccaccctaccccgctttaagaaagtgttggcagaggtgtcctatagggaagaggtacctgggctagggaatgcagttcattttttaataaaaatttaaaaattgctctaaaatcttaaagtatgccatgagaaattaaaagtaaaagtatttcagtttcttcattttacatatggaaggtttgataagtattttttcactcttgatattggagaaaaataacttctagtaaaagatgggatttataacttccaaattacggtagaaaagagatttcaaagaaaataccgtccatatagtgaaagacagaaactaaggaaaaacaaggaatgtaaaaaataatatctcatagaaaagaagaagcaatgtaagttaaatactcctaataaaaggcaaaaatactcaaatttagccaatataaaagatgcacctaaaaagttactttaaaaagatttaaagcaaaaagtgaaataagatggagaactaacaattattccacatgcatacaaattaaaataaagcaggatgcaaaagtatttcaagatgtaattaatataggtctcagtctattttctgttggtataactgaatacccaagactgggtaattcattaaaaaaagaaatttacttcttgtagttcaggaagctgagaagtccaaggtggagggcctctacctagctggcttctggtgagggtcgtgtgctgtgtcacagtgtggtagagaagcaaggcaagcaaacatccaaagaaacatgcactagaggctgggctaactttataacgacactctttctctgaaactagtccgctttctgctagggtgagaactcactcccatgagatggcattaatctattgatgagagcagagtccccatgattcaaacacttcccactaaggcctcacttcccaatgctgccaccttggggaccaagcctcaacatgagttttgatggggacaaaccatagcaatatattatacttattaagtaagataaactggtcatttttaatttaaaaagctgtaatccctaatgaagacataactctcaagtacatatacctcacactatggcatcaagatatgtaaagcaaacatttgagacacataaggagaaattagctgaaacacaatggtagaagaaaacctcaagaaggcaaaaacaaaataaggggagtatctgaatagttttccttttgtgaatcatgcttttaagtcagaactctttgcttaatcctagttcccaatgattttctccttttatttccctaaaacatttattgcttcatgttttacaggttttgatctattttgagctaacttttgtgtaaaatgggaggtttaggtcaagattcactttttgctcttctaagataaaataagattttaatttttgcctattgagatatatatatatgttttaaataacagtatatagaattggtaagggtgcaaaaaatgcgcaccctaaaactgtaattgggaatacagattggtaaaaaccaatatgattcaacatttgcacttcttgggatttcttcaaagataaaaaaatagatatgcccccaaatgtacttagaatagtgttgattaaagtcttattgcaggaaaacactggaaacaatctaaatggatgactgattaatagaatagaatacaaaaagattgcaattatatgtagccatgtgaaaatgtgcatgataaattattaaataaaaaataggttacaaaacaatatgtaaatgttattaataaagtgatatttgttttttcctaaaagttccaacaatgttcaatgttaccactaagagtatttttattttgagagtttattgtaaagcagagaatagttttggtgttttgttgtggttactattttgagttttattactatcttaattagttttcctttcactgaattttaaagtattacaatatttcaaagttgtttttaatgaagaggaaagcagttttccctcagcatactgcatctctgactttgtaatggaagttattaaaacatacatttgtttaaacacacatacacgtaattacaattataaaatagttgtatctattctttgttagaggctttttaatcactaaaactttaggaaggaaataaaacatgagaaagttgctcttgactgctacttttaagggaggtgaacctaaaacctacaatttgtttcttagaaaaatggcttaaggcttattatttaaactaactaccatcattacctttgcaaacactctttatttcgatggagtcatttaggccctcttagctactgtaactaagattttagtttggcttttattgtagcactcaaggaaagatattatgtagaagaaaaattattcattgttttcaaggcaaarctggtgggactaaggagcaatggtgcccagaatatgatcaaaacaaggaagacttcaataagttagatatgttctattacagtatttgccagagcacatctggtttattaagagactattttaattcttatttcagataaaactgcttttttggattaatcaaattggggtatccacttcatgcagtaatcttgaaagccaagtaactttttttactgatttatctttcatagaggtaaatactttacaaatctcagattctaaggaatttagttaaaataagaactttgatagttagtttgtctcagtatgaagctattaaaagagaaatattatgtggttatatgtgtatattgtatattcatcaggtaaatacacatgtatacatctataacgagaagagaattattatggtgaatgatttctattgtgtaatatggccctaaattagaataataattgtaattagtagtgtttgtttaaaatcgactttttaattcttgagagagaaggggaagaaaagaaaaaatatggaagtgtgagtaatctctactacggaatagataatttatagaatatatttttaaaagaaaaacctcagccaaattaaatttaaagtttaaatgagcaatggatgattcgtgaatcgggcagcctccagaatcacagcagattcagagagtctccagggatgccatgtggtcagaacaaattcatagacaaaaaaaataaataaataaaaggaagtgacatacagaaatcagaagtgaggtacagaaacaactggattggttactgctcagcatttgcgttacttgaacagtttgaacactcagcagtgtgtgagtggttgaagtatggctgctgggactggccaagactcagccattgttacaggcgcatactcttagttaggttttcagtcttgtttacctattaagttaggtttcagttcatccacaaggactcaaatatagaattatggagtctttctcaggccatatttagtttgctttaacaatattgacaataatttactgatacgtagaaattcataaattcaccacaacaacactggtttttttatgcatagattgaggtatgtgactttgaaggtaggtgtaaaatgggcttattatccttttgtacacttaaaatgttttagtgagtctaaatcctttcaagtttctcttgatacagagcttatgatatgtacttatgcatcttcctaaatacatgaaatattttaaaattgctttcttttttttttttttttttttgagacaaggtcttactctgtcccccaggctggagtgcagtggcacaatcacagctcactgtatccttgacctcctagactcaggtgattctcccacctcagcctcccaggtagctgggactacaggcatgtgccaccacatctggctaattttttgcacttcttgtagaaacagtgtttcgccatgttgcctaggctggtctctaactcttgggctcaagcaatcagcccgcctcagtttcccaaagtgctgggattacaggcacgaggcactgagctggccaaaaattgctttcttgaaatgtttaaaagtcacatttgaactgagagtgaggggatacattttaatgaaattgtatcttaagctttgtacctgtgaacccaaaagtatctgagacaggtgttaatcaatttaaaaagtttattttgccaaagttaatgatgccctggtgacctcaggaggtcctgacgacatgtgcccaaggtggtcagggtacagcttgcttttatacattttatggagacataattcttcaagcaatacatgtaatatttacattggttttatctagaagggcagttaaaaccatggcgggggggcttccagatcataggtagatttaaaatttttcttattggcaatttgttgaaagagttatctgtagaaagaaatatctggattactaaggggttgtggagaccaaagttttatcatgcagatgaaaccaccaagtaacaggcttcagagagaatagattataaatgtttcttatcagacttgaggtcacaggcagtaaagggttaaataagaaagcaggagataaagcacatttttaaaaaatataaatacatggtaaacattagaagaaaaaaacaatttttttcctaaatacttaaagaaatgagaggaaaagtaaaccaaagaaaacccaggtagaggaagacacacaagcacaacataatgcacacagtaattgaaacataaatatgatacatttgagaaaaacatcagtaatattagtaaatgtagacaggcctaattcacctattataagtagaaaaatcatttttaaatttgcccctcaaggaaaaaaatccaactgtttgctctataaaagagagatacctaaaacgtggtgattcagaaggctaaaaaaagtcaaggagagaagctatgcaaagcaaatagaagtaagaaagcaggagttgccatcctgataaccagacaagaattccagccaaaaacacaaagaaagacacttttagatgataaaagccataattcacagtgaaagtacagcacttaatatttatgaaccaagttataaagcactcacatttaaaagcagaagctataggagatggaaggacacatgatattgaagtatcatggtgataaaagatttaacacagtactttcagtccgagacagctaaaatggacaaaaatgaggaaaacatactaaagaatttaattgatagatcttayaaatctatctctatctacatttatacctatacctttaatccctgatagtagagaatgtaccacatatggaacattcacaaaaataaatcaaatattaattcacaaagcatcactaaatttcataaagtagaacaattacagacaacacttcgatcgtatgcagtaagtaaagctggaaattgatagcaaaataaaaaaattaaaatgtacctccaccttggggggaaaagttctattaataaagtcttgagtgtaagaggaaacaaaactgaaattacagaatttcttttttaaaaattatgaaaaccctatgtgttagaatctaagatatgcctaaagtactgtgagagaaagaggataggttgaaacatttattaccaatggggggcaaaaacaccgcatgttctcactcataggtgggaattgaacaggatggcactttattcctaaacactaaattgtatatttcattagaaaaatattctcttacacaaccaaagtataatgatcaaaatcagaaaattacgactacctaagtaagaaagttgcataaaagttaatctagtggttttgttaagaactagttaatctagtggttttgtgatgagtagcttgaaaatgaagatttttaatataacaaattctttctaggcttgagctttatattgttcccaatgggaaaaatataatttgagcaaaggttttcgcttataataacagtaacattttttctctcgaattttaacaatcagaatgaaaaaatccaaaaaacaaagtattatgttctgtgaaataatcatttgtgactttaaggttgaagaagataacgatagtggaagtttaaatgcaaaaaatattaatagtatcttagatagtgttactatattgaagttgtgtttccattaaattgaatcaaatgcaaaatagctttatttttatctacatgatcctaaataacaattgtaactattttttttcactcagttgtgaaattatgtggacatagttataatgcagatgatttctacaaaaattctactatcagagttcagaaagtttttcgttactattactgatgtttaaagacaagtgggacagattaatgggttgaaatgtgagcttttcaaaatagtacaaaattactaattgctattgtttgagtgttttttgcctttccttttcccaaggccattataaggatttcacttgatttcttccctgytcttaacttttgaaaagctttaagctagaagtaatttggggattctatgcgacctgatggggaggaaagtaaaggtgaagtagtttttccaggagttttgtggagaggaaatgtggagaaatgggactgtgaagaaagtacataggagaagaaaaaaggatttttaaaagtattgttcaagaaataaaatcaaataacttattttaaaattagtttttgattgcctttgagttcctctggctacaacgcagcttcagatgagacaacatgggtcaaagatttaatgaagttgggaactgtcaaaaagtttgtatcaatgactgtcatggaaatgtaggggaggagaaaacaatctaatctggaaatggaaggtattaccacaaggtgaacattcactgttgtttttttgttgaataacattttattatgttaaggaacgagttaagtaattgatttatggcctaacattttttcttatttgaataacattttttttttctctcttgaggcattgaacattatgttggcctggggaaagggaatgtagaaaaaaatggggtaaaatttgattctaatatgtctttcctatatgtaaaacaaacttgacatgtttgtattttctttttgtcctatgakccatcaaatcctgctctatactgttagccaaattgttagcattttccctaagtggaagtgtaatctttaaagtaactagttgtcatataaattcttcaagattttaatatcagtcactatggcagtcatcttttttcttttagccttatttgttatttcagctctcaaaattaaattcatcaaggttccacagataaaacatttctagagttatccttaacatagtaacttgtaagtgaacggtcttcagtattatttgtatatgtagtaaaaccattacatgctgtttctctatataatgcttccaaaatgaaagaggagggggaatttttatagactgtcactgctaggtcatggacttttaaagaaatgtttccttcatttggatgggccctttcattatcaacatgtctatgaaaktatctggcttaaaacacctgataytactttagagcaaaattgattggtcatgtagaaaaataggctcttgaggttttttagagggaaccyaaccatataaaactaacatgtcatagattagaaagatagagtgtcagtgtttttgtgttcactctgtgaaaacaaattggaaacataaatggaaaaagtaaagatgataaggagtaagtcatctctactttttattggtaataaatccattaattggaaataaattggaaaatccattaattggaaattaacttcctgtgcattgttttcttgcagggaacaaatcacaagacagtggcatagcagagatggaagaacttcctgtaccacataacatcaaaataagcaatataacgtgtgactcattcaagatttcatgggaaatggattcaaaatcaaaggatcgcattacacactattttattgacctcaacaagaaagagaacaagaactccaataaatttaaacacaaggtaaaatctaacaaatactcatgctaatttgcatcttaaaactttctaagtatgaggacattttaaaagaacgaataatattctattaatggcttatgtgatgtatttgacttgggaaaaaataaagattatatgtaactctaaaaccctatcattctaataagttttgtaagaaaatgaaatgccatgctttttgytagaagataattttcaaaaaaaggtaaaatcatgactatcatctagatgtaaaaattagtttaccttaaagattttatttaacttattaacgaggaaaccgatgaggtgttataaccagttcaaagggaaatccaaagaaaagactcatttgtagatacaggtgtaaactggtatggaagtcctgatgggaggggtgaagaggagggttgtcctccactgaacataatttatttgtatgtatttagacaagaagaactgaattgttactagtttctacaaattacagaattgtaaaatggcttccataacacagacagatggccagaagagggtgctatgtgcaatgcatagttttccactgaagcacacttttttttctataactgccaaacaaggaatctgatgcagtttataaacttcaaggtattttaaaaacactttagggctaaaaattgctttaagtagtctgctgtcttttgccttttgttttttgttttgataatgaaatttttttgtcttttgctttttagttttgagaatgaaaattattaacttttaaatgtttttagatatataacacttctctgatatttattcacatatcatatatcttttctgatatatctctctttccagaagtatctatagagaaattaacagttatctgctttaagcattctttcttatgttgcagtgttttcactgatgatgaaaatctggtctattttttaatattgatattaagttttaacttggtagatactttggaactttcttaccttacctagaaatattgcttttattagatgtgcgattatacatactaaagataagtgaggatcatacatactacagataagtgtgaaagagggagcaagattgagcagtcattattttttctgagttccagttctgtttatgctttcagtgatggatattctctttgctgacatttkccttgttgatatagctttgaaatcttaaatttcaaacattaaatgatgaattgtttgagatttgaccctttttcttcactctccacttggaataccatatccttgaaatgtagtgaatattcaactagcagatttaattaatcactttactaagcattttttagaaatacgtaaacttttctgtgacacatagactctatatttgaatgaaagtgaagcaaaaattcatatttttagtgttttctcctttaacctgtaaaatatcaagtaatgggcagctttagtgaaattattgggtagtataagttaaccaaatataatatttttaatactattgaactttatcttttatgtctctgttttttaaagttttgtcatttagtatgagaatgttgcattttgaggagcatatagtatacagaaaagaacaccatattagaaatcaagaaaactggaatccaagtacatttatgttattaacaagctgtatgacctcgaacttgtctcttgataaagttgggccttagtttttgcatatagcaaataagagatttaaatataataattgttaagtatctttaagcagaaaaattctrttgtcagtcaggaacttaataagttattctccattgtttacagttgattaaagttatactactaaattaacttcctccttttccctccttccttccctccctccttcccttcttccttccctccttctcccttccctccttcctcccttctcccttttcttctttcttcacttccttcgtccctctctgtctcccctcatttttctctctctcttccttctttcattcctaggatgttcccacaaaattggtggcaaaagctgttcccttgcctatgactgtccgtggacactggtttttaagcccaagaactgaatatacagtagcagtgcagactgcctcaaaacaagttgatggtgattatgttgtgtctgaatggagtgaaattatagaattctgcaccgcaggtaagagaactaggtacaaatatagaaaagctttarttgttctgggaaagctaattatagaaaaatatttcttttttgtaattataaagtgatatatgtgacattggtcattttttgcgttgtcagtagcattgtgtaacagaataaacaatgttgtattgattggaggaagctgaagttctcagtagaaaaatctgagtaatggcttcaaatcatttttttctatatccatagtttgatttcttcaagatgaaagctatgcaaataaaaaggtatgcagtttgaaaatatactcagcataattttttagcttcattttgagagacagagcttttttctccttttttttttttttcctttttcattttcaccagtactgaaagacagaaactaggaaaatccttctctatttcaggtgaatggaggcagatctcagtgactgtccctagcagaaatgttactagatttttcactggagtactagaagaccttaagaaaatctgcatctaaactagtgtcctgtatacatatgtgtgtctttgcttcactcgaaagtacctcaaagccattgttttgggaggtttgatgtggaactgaaccttaatattccattagattggaaacattaccattcatctcactcatatatttattgtttacttgttcattcaagaaacagtcatttattgagcacttcagtgttaatgggataccatatctctacctgagtactcctgtcatcctttccttttgtcttttagaaagaaactttgtttcctcctgttcatcaagatgactgtttcctataaaaaactatagacagaggctgaatctacaagaaacttaagctgttcaaagctcttgtttatcagaataatttagacttttcacataagctttgtcaataaccttgactctaagttttgataaagctattttgtgtaagttgacttttaatctgaacatcgaattcattcaaaactaattaagcccatactgtgagctaggcactgtacaatgtattggaaataaaataaaatagaatgccacaggctaatctacttcttttctagcctatgacagggtttaaaaccctgtgcttatcccaatcttaaaatgctaatacttaccataataaatcattattgtacatatatttatctcttctcttagattgtcagttctttgcaaggaataataatatattttttatcttttaacttgatcatctaattttgcatagtaccttttacatcatatgttctaatctcagtacctgtttattgagccaatgaagcagtgagtaaacaaactatgttgccatgagcaatttaactaggtttcttctgtttagaaattcttactaatctttataggccaaaatgtttccctagtttctggtgtaggagttaaacagcaattcttaaacaactttcaaaacaaaaagtgggttaaaaaaaatcagatttactttgacaggtgctttagagtttcaagcatcttgtgtacccaagtcttatgtactcattattatttttgctgtccaacttttctattgattgcagattataagcttcttttattcagtttatcaactggttgaagaaaagctagtatggtgctaatggatattacttgggttatgaaaatttatttaacttaatttttgtttcagtatctctaatttcaaaaaatggaaaaatgcaagcaaaggtattctaagaaacaaccataaaccataacaaaaatatttttgtaggaagaaaaatgtgccacacagacaatgaatattttcttttttaaatggaatttcctatttattaagttgaattccytagaggtgaattttaataatcttcaatttatkaagtatatggttggtacttttggtgcaatatttttaataacagactttttgggttttttccagactattcaaaagttcatctaacacaattgttggagaaggctgaagtgattgcaggacgcatgcttaagttttctgttttttatcgtaatcagcacaaagaatattttgactatgttcggtaagattcaaaaatatatagtgatttgttttactaaatatagtttcaaattctaggctcaggtttcccttgactctagttttgtcgaatagcaattctagatttcttttcaaaataacgatatggaattttattttccagaaaaattaagtagaaaaagatcatgggatttttttctatttcacttagattcctttccataatcatttgtgataccagttcctgcccatttgactagaggatcttaaacctgtggtatttagatcgatgagcatttcaggtacacactcgtcctgctgtctgcatcatactgactactaattttttcctcttttcatgggtctttttaagacattgaaaatgagagtataaaagagtgactgtttaatgaaatattatggtgaatcaggtgggatttgcagacttctacctaagtagaagtcttttagctgttgtattagtgtgtttttcaggctgctgataaaatgtacccgagattgggcaatttaaaaaagaaagaagtttgttggacttacagttccacatggctggagaggcctcacaatcatggtggaaggcaaggagaagcaagtcacatcttacatggatagcaacaggcaaaaagagagcttgtgcacrgaaactccccttttaaaaccatcagatctcatgagactcattcactatcatgagaacagcacaggaaagatttccccctccccataattcaatcaactcccactgggttcctcccatgacatgtgggaattgtgggagttacaattcaagatgagatttgggtggggacacagccaaaacatatcagctgttatcttgaattaattatcatgaggataatctcctttgtttacttttaaattctagtgattttactagaatttctaagatagcctatgtttatccctggaagcagttcctgagaagttaaaagaactctatcctgcaggtagtttttatatttacagcactttcatatttgtagaagaaaatttgaagagaataaatagccagatgtctgttttgtgttttaaaagccttagtctcactaaggcttttaaaatggcaaatgctatataggttgtaaaacttcttacacagcattccctataatttatcattttaaaagcttcacttcagactctaaagcattcttaagttgacaggactatgtatgaaaaatatttaggaaactttgttgtgttctttgtatttgtttgtttgaagaccatggttccagatttaaatcagcttcaagctgtggaaaatgcaacaggaatcagagagagaagaacacacgtaggcatctgtgttcttcaaattaagtacttagcaatagaatgtatttttatatattttgatggtgaaaaaatattcctgccatttgtttgaatatcttataaatacagagtttagtccttcattttctcaattggtatataccctagagtccatatatttcctggtagataccattcacctaatttagagagtacagactgatagatataacataaattattgtgcttgtcagttgtggattggcaatgaccatatagacttagcaaggaaggtgtttctttatacagatgctccttgacttgcaatggggttatgtcctgttaaacccattgtaagttgaaaatatcaagttgaaaattcatttaatacacctaacttacaaaacatcatagcttagcctagcctccttaaacattttcagataacttacgttagcctacagttgggcaaaattatctaacagaaagtctattttataaaaaaaaaaagtgttgaaaagatcaacattcaaagtacagtttctactgaatgtgcatcattttcacaccatcataaagtcaaacaattgtaagccaaaccatcataagtcagggactgtctgtatttgttacgcataaaatttgaaaacaaaaaaaacccctccatatttctgttgtctttggtaagaaatacatcaaaagaataaataattacatctttgattttaggtttatattcctggaacattgccaatatctattttaggtggccactggagggcagtatctctctgtgatttttctctgtcccttagatgggaactggcctttgtttttaggtcctttagtaatctaaagtttgcttcatctgttttcaaaaatgcttccaagaataaataaataaagacagagtgcctagaaaatggataattattgtgtatattgcatgattttactcccagctaccagtatgaaagctgtgtttactaacaagaaaatttacctttgttaagttttccataatgatagttataaaatccatgtaaaatatgtcttggtgcagtacgtataaataaatatactttccacagagtggtataatttttcaacattgcttttttaagaagccttattaaaaagtagtagacataaattccatggatgttgattttctttttgtcattaactctaattaagacacatttccttgattaaaatccattttaaatatcatcttgttattcagaatgcttgaatagaaaggaaactttyaattactggatacactttccaaagtttataatccattttgaattatgaaaaactggataaatacttactcagtccataagaaatcaactcattttgacctcttcctctagaaatgaattcctaaatgaacattactttcccatactccaaatgaaaacaccactttctytcttacctcttgttcatattcactaggtagtctaattgtccttaaaactccttttatatctgaagggtttcaggaattcactgagattggtagacatgtgtaggaattcctstacctctggtgtcaaattgtatatcctcaaagtgtaggttctagtacatattttctgtttatatatatgttgctgttattatttcatgtaattgcacttatagatccatgtaggacacatatcatagatatttggattttgttaatgagaatgtaacaagggcgagaaattttgaacagggacaagatgggtagattctcttttccttatttcgcccacatctatctattgtttactcttcactcaagaaacagtcattattgagcacttcaatatgttaatgggatacaaagatatctcttttgtctgtgccaatgagcacagacaaaaaagaaataaagaacaccagaaagtatgttccctttacccacaggattgggaaagagactgagatgactttgaatacagaaaccttttagacaataaccaccataccccaggcaaacagtataggaaaaaaacaaacaaaccgtagtccctcatgtaccagccaaggctaagtgaggaacctagacctctatcctctcacatctgtaaggggacacccttctccttccatcctctgctagggtggtatcagagaagcctgaatagggagcctggattttccaccactgcccaaagaaaatgaggcttgccctcatagtgtgtgaagccacatgtcaagtactaatgagacaccccttctctctctgatctagagtatgttagcacaggcttagtgggagcctaaactcctacctcctccaagtagtaactgaccctcctaccctgtgtcaccggagactgagtaggaaacctggacttttagccccatctgacatcaatgaagtgactaccccatactcttcacccactggtagatagtcaggaggaggcctgctaaaaatgctagatttaaatatgatccagaatataataacataaaacttaaaatgtccaggatacaaatggaactcaggtatcacaccaagaaccaggaaaatcttaacctgaatgagaaaagataatcaaagatacaaaaaccaaaataatgcagatcttggaattatctgacaaagatatttaagcagccaccataaaaatggttcaagaagcacatactaacacacttgaaacacataaaaacggaagcagcaaagaaatagaagatacaaagaattaaatgaaaattttggaacataaaaacacagtaagtaaagtcaaaagctggatagactccatggattccacagcagattcaagaggacaaagagaaaaaaatcagtaaacttgaagatagaatagaaattacgcaaattgaacaacagagataaaactcaccgaaaaatatatatcagtcttatggacatgtgagactatagcagatctaatattcatgttgttaaagtcaagaaggaaaagacaaagagggtggggctgaaaaagtattcatagaattaatagccgaaatgttcccaaatttgccaaacaacataaacatacagattcaagctgagaaaaccctaaatgggataaacccaaagaaatccatgccaagatatattacaaactgaaaactgcaggccaaaggaaaaaaaaaaaacattgaaagtggtgagatacaagacaccttatgtataaggaaaaataaaacaatttgaatgacatcatcatcagaaattacctagcaaaagaaagtgacacaatattttcaaatgctgaacgagcactgtcaactgagaatcctatatccggtgaaaatatccttcaataataaaagggaattaagatatgctcagatgaaggaaaactaaggggatttgtcaacagcatatctatcctaaaggaagtttctgaaacaggaaggaaggaaataataaaagaaggaaacctggaacatcagaaagaaaaaagcacagtacaagtaaaagtatagggtcacatccaggatatcacacatttatttattgtgtttcctcattctcttaactgtgacaattttttggtctttccttgaatttgcatttttaataagctccctaggtggttttcaggtggtagaattcgagacccattgctgctaaattcagaggcagatccaggcatttcactgacccataaactctttaagaagcatgttgactgggggaactttcccttacttgagtagtagcttgaactttgcttcccaagtcatgctggtcagggacccagcaaaaaaaaacaaacaacaaaaaaaagaaggcagcacacttggggaattctggagagaatttaacaaaactaccccttcatagaggtgtagtcagggttacggtaacaaataggggatgctaaaggaaccaagaactagcactagcaagacttgaaaagttttactcttcacgggaatgaaagggaataggaattcatccagcagcagcagtagtcagagatacatagttatgaagaatgcagccctgccagaaccacaatgccctaaagcgtggaggaaatacaggaagacatacccaaagctttacctcctcctactctatatatgctggtgcctcacattggtagaactgaaatggaagtggccaagggataaggaactgaatgctagagtcccagatcacagtggaggactgtggtggagaatgaatggatttgggggtgaggtaaagtgggaataactagcactgttttaagcaaaatgccagagaaataacctgattactgtccttgggttaaaaagccaaaacaagggctgagcgtggtggctcatgcctgtaatcccagcactttgggaggccgaggtgggcggatcacaaggtcaagagatcaaaccatcctggccaacgtggtgaaaccccgtctgtagtaaaagtacaaaaattagctgggcatggtggcatatgcctgtagtcccagccactctgaaggctgaggcaggagaattgcttgaacctgggaggcagaggttgcagtgagccaagatcgtgccactgctytccagcctggcaacagagtgagactctgtctcaaaaaaaaaaaaaaaaaaaaaaaaaaaaaaaaagccaaaacaaaacacaacgcttttgtgccagtataaatggacagcactcattttatgactaaatctatcatgctttaaagaaacattcaatatatttaaccaatacctttagttcagttttctcttcagaaagccacttctgaaacccagttggcacttaatgtatgtgtgattttacctgtaaggtttctaattccagtttgatttttctggccaggaaatttacattattatgttaatttaatacaaagtctccaaggcttgtagcagctcatccttaccttaaggtcaaagctagaatacagccatctataggtaatatgtcaaaagatgttgtccccttattctgatagtaagagaggtattcaggcctttaacagtagatgtttgacttttaggccattcaaatatataaatcagtgggtttaccactattgtattaagcagtgaccacttgttttctcttgcagagaacatcatgggaatgctatgcagccatctgtcaaggataacagtggtagccatggctctcctatcagtggaaaattagaaggcatcttcttcagctgcagcactgaattcaatactggaaagccaccccaggattcaccttatggaagatacaggtttgagattgccgcagaaaaactttttaaccccaatactaacttatactttggggacttctactgtatgtacactgcttatcattatgtgattcttgttattgctcctgtgggatcaccaggagatgaattttgtaagcagcgccttcctcaactaaattctaaggataataaatttttgacctgtacagaagaagatggggtgctggtttaccaccatgcccaggatgtcattttagaagtcatttacactgaccctgtggatctttctstgggcaccgtggcagaaatcactggtcatcagctcatgagtttgtctactgcaaatgcaaagaaagatcccagctgcaaaacctgtaatatcagtgttggacgttaatgcccacttttcttattcttactcagccccttttcctcccttaggagcattggtcctctgttgtccatttttatcaccagatgttttccactgaagcatgcacatgccactgtcaccaaaacaaacaactaccactttccaaatttcattcagaaccattttagtgttttcctattccctacccctcccactactttcaatgatgaaataccctaagttaagttctccttttgacactttattgcctagatgctgcaatgtttttatgtttcctttatgccaaacataacaaaacagttatatagactgctttagcaaagtacacaataatggcttataaatggtgtttaaatatgcattcattttaatctactgaacaaatattgggataactccaaaccgcatgaaagggtgtaattgcagcatgagttaaatcttgaagcctagaattgtcagcacttccaacttcttgtttgacagtgttatttatgttatttatattagctaacaggaaacaactactgtgtttcaacataataaatataatagaaaaatattttatttgtattgttgtataaaatatttacaatcatatagaatatatagagttacattttaatagcaactgtgtacatgtcacgaaaccatttcccttatcaaagatgtaatttgtaaacctcaaatagttgtgtatctgtcctgttagaagtagatgacttcaattaaacaaatttatgaaggacattattctgattcataaaagttataaaatattaggtaaatacagagaaaacaataagcctctgaaataagtctgtttctgaaatagtcaatagtcttcccatccaaactataagagaatgtgaatttcttcaacatcatacttaaacattacagaaaatagaaatacaaacaaggttggtacatgagagaaaatgttgaccttttacttccttttacaaaaatgaaaataataaacatgttttcgtataaaataacacaaaatgatatacactgaagttgatgaagcaaataaatattctggcttctttttcaagrtatcagggcaaacaatttccaaacttttcattttgtacagaaggatgaataactacagctcatgggaaatgttttgactttacaaagtatagatgttggaacattaagaaaaatgtatattcccaatgaaaaaatagttatatcatcttatagtaaaccaaaagattagcaataatactatggacacattagattatatactacagacacatatctatccaaaatacctattttaaatttttaatacaatattttattttaatataaacatctgtcagttatagacaaagataataattcacaaagtacatgctatcagaatgaactttggtaaccagaaatgtaaaatttcaaataacggataaaataatgtgttatttttatagagaaagaaaaaaaatagcaacacaatctagtttattttagggtactgagagcctagcagacttaaaggacaaggtagtaaatgttttatcactcaaaaatccattagaagtttcaaataaattgctttcttgctagctgtattccttcctacttgaaaagcgaatttcttttcctcctatgattgattttttaaaatcatgctcttttccatacatcaacataaacagtctttggatactaaataaactttccctaacaagtgtcctagctatgttatttagatttgataaaatattagacatttttaaaaatacttgtattgactatgagttttctgcttggcatggaggacactgaattttttcccaattatatggctacctgttgtattcttccccccgtttaaatcccttctccttgtatataattaaacttgctattccttcttaaaaacagctaatactaccactaaagtgcttccattttcattgtgtcaaaactacttagcaaggatggcagaggaaaataaactttactttatatcatgggtgaaagtgatcataacatttcctgaacctcaaatagttttggccacatcttgcttgctgatgaggacctctaatagtctcagtttggcttttatgtgcttatattcataatactcatctgccattggtatcctatcttccttttgtggacttctgcaaaacaaaaatacatttgttagttcacaatgagtcaagtcattatttaaacattcttttataattcatacatgagaaagtatactgtaacagcctccacttggtttttgcatcatgtcttcttttccttccctttcaccttcattcactccttcttccatgtgttactaagtttctaaataatagtaacctttgaaaacttgaatgtcataagtgttttgcaaatatgtggtctagtgcttagacttacaacaaaggggtcagtgaaaagatctaaggagaagcaaacaaacaagaaacagaactttcaaggcattctttgtccagtcattcttccattatttgccacacccctacagctgtacaaaatgatcagccctaatacagttgttaaaaatattaacctgaaaatactacaggaatttcattataaaaataacataaacctatggtaacaagaaaagcatttagggtctgtcttacaaacttgaaacgtttccagattttcttgtaattataatacctatctctgctaatatatagtagaaccactgagctgttccttgattgaagtaattgacaagagtctaaattgtggtggttctcttctgtacactaattctactaaggctagacatgtaacaatgcatagatttttatacatatgcagcatactcttgctgtttacttggaagaataacttggtaatatcaggagttaaaaccatttgccttcccacaaaaatatgttgtcaggaaacgttttctaaagggaaaaattgcgacagggtctcagaaggctcttgttttcttggttaataagatagccaatcgttttgaaaacatttccacccacgactttgaaattcaaggggtagaggacacagatatagtcaccacaattacaactgaatataaccacaagtattctctaatgttagtatggctgaaaccaggtaaatagcatatatttaatgttttatctttagctcccttctatttttcccagtagtgataaagagatatttctatctcttaccaaataaaaaacaagctaatctatacaaattaagaatatagtatctacttgtatttcaacactatttattgccctgcaatttctagtacagaactcagaacagtatacaaatccatagacagcattcttcttaactgttgtctaaattatataacatatatctttgcctccattctgtgttatgagtcaaacttatcatggctggatgtctgaataccaccttaatttgtataaatagatctaagtaaagaaattgtctaattattacagagaaacattaataatcaattatgtaattttccrtagttttgcatattccattttggctaataagagtgctttgaggccgggcacagtggctcacgcctgtaatcccagcactttgagaggccgaggcgggcggatcacaaggtcaggagattgagaccatcctggctaacatggtgaaaccctgtctctactaaaaatataaaaacttagccacgcgtggtggcgtacgcctgtagtcccagctacttgggaggctgaggcaggagaatggcgtgaaccgtgaacccaggaggcggagcttgcagtgagccgagatcgcgtcactgcactccagcccaggtgacagagtgagactccgtctcaaaagaaaaaaaaaaaaaaaaaaaaaaagagtgctttgacaagaatgaaaagttttgccaagtctttcctgaaggagtttctccattatataaaacatactaaagtgcttagcacacttccaggctaataattattaataataatgtaatatctgcatgattctcatgcctcttgtatggcaaatattaccaagaacatttatagtgccttaaacattttagtaatccatttgcatggttattttaacttatggatgcttaggccttcccaataaaatgtcttagataaacaaaattaaggtccatatttcctagccattcaactgtttgattttagttgtaaaagatcatcacttgtgcatttagttgaaatatatcatcacaagggggcataaaacttcatagacaaatacagacttatctgaagtgggtttaagactcataggtgcagtggaacactatacatagaacataactaacttccctgtatgtatgacaaaaagcacaccaagtgacactgcagatccagtagggaggactagtagcacactgggaagttctcaaaccccttacgatagattcctgagttcaaattgctaaaaaatataaatttattcagggaactcaaatttatgaaaagagtgtacgcacatcttaaagtgtcatttctcatatgtaatgactgtttagatttagaatatgtgataacatctccacaaatatttccctgaatgaaaaattcccatagaatacctttaatccaaaagaggcagagatcaggaactttatagtgcaagtcacatatttacccaaagtataataggagcagacagtccagacagacaaagttactactccaaggaatattttacaaggaaagttacatgaacattttataaaagaaaaaagtatggaaaaggaaaaaaataacaaatgctttatattctaaatttatgagccacataacatttctcactagattacttaacatcaccaaaaaggtaagttggacttgtagcaatcaactggaaaggaagattgtaagtagaaaataagttgttacatctgtattggctgaatgcaaaaagcttttcactcaataggtccagtcctaaagaatatccctggtaggctaaaatggaaaacctgccagggactaagaggtaagtagaccacgcatgagagtttcaaggtgcttttggaaaatagtccctttccatcaggacaaccctcaacctgctgaactgaaaagtcaaatacaatacctaaatggagaggaatacagaggagcccatgtagcactgatgagtttaatgatgagtttatgagttgaataatgagtttaatctcatttcatctacttaataacttgtggctttgggaaagttacactcttcatttatttatttttgtaaagattgatatcccacatgacagctgtagcttcccaaagtatcccaggagtccaaccatttcagctcataaaatgggaactgaggttcaagatagctaagcaatttatctctcttccaaattagatcaataaccttatctcttgattatatatgtaattttgttgatgatacaccaaaaattggaggaaactaatagagtgtataatgagacttgggttgacacagaaaaatagaggacagatgatacagctaaccatttatttaagaagtagaaagaatgactatgaatttttgatcaactcttgaaataaaataattagggacagatcctgacttttaaggaagacatttaaagcaaataaggaattattatttaataaattagggagtaacttgtggaactaagaaaccaacaacaaagcagttatgtgggctaaaaaaatcaacagatttttttaaaggtttaaataaattcatttatttatgatgagatttattgtgcaaagttagagatttttggagtttatcctttattttttacagattgatgtcatacctgacagctaccatgtcccatgaaacatccctaatactggcactattagaatgttgcattggacaaatcctgagtctaagccagtgtggaaattatatacattttgtaaaaagtcaccgttcctgcaaaaaattgcagctcatttttaacagcaattctctaggaagtattagctttaaaaatctctctgccgacacataccttcctgtttgtttaaaaaactgttcttcaaattctcttaaggctttccgcagtctcttcttgtcagccctagtttctcggagatggtcaagaagtacaggcctatataaggtaaaatacttgtcattactgggcactggcataattgagagatcatcatgagcagatttatctgttcagccaaaaaagcatctatgattgaaaagtgttcccatcataagagtatcttttgagtaaatatgacacacatagagcctgaccataggcaagcacataagcagggaaaattacctgatggaaaaaatatcacaggataggggaaaggacagacaagaggcaaggagattgattgaatccactgaaggaactggaaagggtaacagcaatataggtggatgagggaagggatattttgaaggaatactcatcagcatttggtgatagactgaacataagagatacagaggagcagcttttaaagaaaattctattcttaatctagagaaataagtgtgggaatattgggagaatagcaaaacccttgtgaatgaaaataagacccagaagaaagcgatagttacattgcaaattctactcacttcattctaccaagatgagagaaaagtcatatactctagagcaggaatctggtatatacacaagcatacccaaactcatgtatggtttcagagattctgtgaacttgaaattatacatgggcattttcttaaaatgattctattggtttcaaaaaagtcccaacaccccttgaaaagttaggaataactgctttagaaccaccaccaaaaaaatgattttctacttgctttctctgacagacacttctgtcaacttaaattaaattaaattaaatctcataatctgggctgtaagatacaaaccaaagaaggccaaattatcatgaggaatgccagctactgaataatgataataataatgataatgataatattaatgaaaatccaaatggcttatatctgaagggctatttaagagacaaagggcaagtcatttgcttactaccaagtggatttctagtggaaaaactatctcatctaaatgtaagagactaggataaaggccctgagaactgttgacccacccctttgagtccagcattttcaaaggccagctctacttcatatactggtatcagaccagaaggagttaagaggagactccacacttaggattcatactcacatggtagcctcatgtaaattagacatggagagagctggtggttttacttctttcttttcatctggtaaaagggccctaacaggctcagtctcattagagtaggtgaggtggtcaccaacaggaaggtgagatgctggatctgccaaagaaggttgttggcttccctgtggacggtcttcatcagagtcctcttcctcctgcttatcacaggcagagttaaagaaagaaagtcatgtaatgctcagtgcctcttgaggaaacaaaaacaggaaggggaactataaatcaatgccatgaaaaccagtaggtgacccatgtgcctactgagaactgggatggaagaaaccaagaggagctctttcgcagtttcattaaaaacctacagaagttaatgagcaaaaaggcagcagtcatgctgggctaaaacactcaccaagttcatctgtgtcttctgggccaatgaaggcacagaccattaggatatggtccagtctggactatactaccaagtggttcctccctttcactcagaccttctgggctccagcttaatacttgtgatatgagttaagataaggtggactacggacaacttttatcctccagaaataccccaagtcaggtcccagtggggaccaacattcagatacagaggatactcagtaaattgacaagttcaggggagagctattt

SEQ ID NO: 6899 - DNA, 22252 bp, Homo sapiens
ctgggcctcacactcctcatccatgaaatatgggatctgtatgatgtgtgctttctgagctcttttggagttgcagtgaacagcaaaggcctggccaccaggctgcatggccacagcctggccaccaatggggtgatggcctcccaggtatcatgagctccccgtgcacaccctgcacctacccctaaagtgacaacctctcttaatgactcacttccttgtcaccatgctgggactgtgcctccctcactgctgtatcccagtgcttcacgtgccataggtccccagccaatacttcttgaaagaataaatgctgagcaaaggcagcttgtttgaaggctcaggtcagctatgtctctcagatgtaactgggagaggaaagggggctggcaagcaagaaagagggaagacttttcagaatgtccaagttttcagtgtgcaagagacactgaggcagtgccaagcccagcacgagggtgaggctgccgctttcagctcggacttcccatcaggtgacaaacacccccaagcctccacagcaaccaccagaccctgtgacactggggaggtttcagcagcatcccgcrgcgtgccaggatcaccagcccctgagcctgcacccacaggctggaactccatgccagtgttcaccaggctggtttctaggtcctgcgctcctcagttcagagagggcctctgggtccctaccccgaggaagagctggagcagcatcccatttcttcccactttccctccctgcagtttccctgtgtggcagcttctccccagcacaagccacagagagacttggtggaggaagcatcctaaccctgggaacaaacgaggccattaaagtggctgaagaagccaaacacagtggctcacacttgtagtcccagtactttgggaagccaaggtaggaggatagcttgagcccgggaggttgaggctgcagtgagccgtaattgtgccacagcactccagaccctgtctcaaaaacaagaacaaaaagcaaaaaacaaacaaacaaaaaggttggagatgaatggccaagatacacctggaattcttcagtctcctgtcagggtgccctgggagggcccctgagaggctggcatctcaccaacaccctccttcgaggagggccccacctgtgcctctcaggcaacagggaggtttcttgctgtgctctctaacatggagaagcctcagggctaatgtggggcagcagaagggatcaggagttctggcccagctaccaaacagctgtgtggccttcgacagttcttctctcctctctgaccccagtttcctcatctctagggctcctccaggctttaaagactaattctgctccttcacttctgtatcctgacacacccaggcagcaccacactcttgcagattgctgttttgtgaatgttctgaagacatatgtgtctgtgtgtctaccttgtacatgcacacctgttgggtgtgtctgaagggctggattacggagggacaggacagtttcatcacactttcttaagcctgagtttgaataaaaacagcacaccactttcctgctgaaatggactgagaggggaggttgtctgcctacctgcacaggctctacgtctgcccatcaaatttgggcccatgtgaagtggctgttgagttggcagtggacaggagcggatcaggtgagtgtggccatttgcaagcagatgtccaaagtcctgcaccttggcagtttgttcagatcagctggcacctgtagtgccctttggggagcaattattgcttctgactacaggcacaaagggggctgtaaggtggaagatctgaggcaggctgggcagtgcctattagacacaccaaacattgaggaagtgcggccaccccagcacaaatagtgaagacggcaaagcatttctggccagcatgtctcaggtgccatcacaacagaattaccttctccacactcggcccctggagtgtccacaacagaattaccttctccacactcggcccctggagtgtccacaacagaattaccttctccacactcggcccctggagtgtccacaacagaattaccttctccacactcggcccctggagtgtccacaacagaattaccttctccacactcggcccctggagtgtccacaacagaattaccttctccacactcggcccctgggagtgtcagctgggagacccggattgtgtctgcccctccaaatcacctctgctcccctcctctttccatataaactccaggagggaagggagttgtggctgctttcttcactgctgtatctcctgtgctagaacagcgagtgcctggcatattatagatgctaataaatagttactcactaaagccaggactccacagagagtaggagaagtctgggaagtctagcagtcgaggaatcgggggcaggtggctgtggcctaagtcctcagatgctgcgcccaggcccctggttctatgattcaggccagcctgctctagggaggtaacccctgctgccccatggtctttagccctggtggccccgccctggccctggcctggctggaagccaaagctccctggggcattccccactcctcatctgtggaagaggcatcccccacccacttcctctcctcctccacagccctgatcgccacctggccccatgtcctgggatccaccacctgcgaaggacgttagtgttcctcccaggataacagagatcaccctgagcaggatgggcggagaacagggaaattgaagagttttcctctcccagcctcacgcaccagagcacaaaccatggcccctgaatccagcacttctccaaactcaagaaaactcctctcagatagacccaataacacagagatggagagggctgcagaaagactggagaacagaaaggaatgtgtagttcttctttaaattagacagcctgaatcacacagacttctgccacaattctatctggggtggctaggaggctagtcagagctgggaggaaaacgcccaaccctcagaagtggaccaacactcgtaccaccagaaaacgaagacatcaaagggcatgccagacacaggcattccaggcaaacagcgttaaggggtagtgctgggcccagttcaccttcgatgacttcttagggataagttgtaagcagaattacaaagaggttaaaaacaaaacaaaaatgtcagaaagcgaagaaggtgttaacaatccttgagttttgagatttttaaaagggtggtgacacaagttgtcagggaagccaggtgtcccaggcactcttctagatattgaccaccaggataaaggtcactgtgcaggtcaaaggtcacagaagagggagtggaggaggaagggaggtgaacgatctttctatttcaatctaactcggcaaagcctgtgagtaagaccgtctagcttcagaaacaacagtcctggaaaaactagaggggaaggaggaaaagaataaatgagcagccccaggcaagaggtgatggctgagaaaaaccagaatggaaacagaatgagatgaagtgcctgggaagagggctccagcaggggacatgggaaagaaaggaatggctgggagggaaggcagcctggagcctgcttcccacgtgggaagcatggtgagagaaggctggggacctcccttcccgtgggcatgctggcccagccactcaccacgcctggaccctccaagacctttgttttgtggaaagctctgcaagcgtttgctcagtatggctcaggaaacaagtgtcctttcttctgggggccagattatcatgcaatgaagagtacagaaaacaaacataattattctttccacttgagaaccatgcaccaccctggctggggttggcaacggaaccaggtgaaggaactcctctgctcttcctggcctgtatcaacacaagctatgattcatatctttcctgtggaaactgagactcccaaataatctctagatgggggagaggcttacccccgggcctcagtcccaaggaggaaacagtttagagaacaaagaactaccgctccaagtgccaagctgccattccaggcaggtgagaacatctgccaaatggtcggttaccagtgtgcccctaaaaggacacctgtgtggaaagaccatggaatctggctctgcttcttgtgggtctgtctgactagttaaccattctgggctcaatgccctcatccacgaaatggagactgaatgctgattaattcctctcttactctcccaggcttcaaaaccacagcaagaagaaagcaggcagcaagataaaagaagattcaggccaggcgcggtggcttaagcccgtaatctcagtactttgggaggccaaagaggatggatgacttgagctcaagagttcaagactagcctgagcaaaatgtcgacacccagtttttacaaaatagtaaaaaaattagagaggcatggtggagcatgcctgtagtcccagctactcaggaagctgaggtgggatgatcacctgagcccaggaggtggcggttgcagtgagccgagattgagctgctgcactccagcctgggtgacagagtgagaccctgtctcaaggcagaaaaaaaaagaagattcagcaatgttttggtttgactcttcccatggtagagatggggcaatgagttgcagaacagagagatgaggtgccttgaagtcttctttgcggtttgtagactaatatagaatgtagggcacagtctacaaggttaacaggagaaacagggaaggaacgaatcctctgctaggtgcagctgttggagctcttttgatgaaggactggagagctaggaattcttggtcctcaggaggaggaggaacctgcctgggagacttctgggataggcagcctcaaatgcagcttggaggtgatgattcatggtacaccatcttgtacagttttatcttcccaacaggaccatgagcttgttgaagataaataatgtgcattgtgtttcttttgaattcccacaggactagtcacaggatggacatggttggcacttccttaatattacttgattgtatcagaaagagggaagcctcaatagacatttactcagcacttacatataccgggcattgcgaaagttttcacatgtgaatattcattacaaaccccattttacagacatgaaagttgaggcacagaaaagtttcatggcttgctcaaggtcccacaactatgagcaggtctgagattcaaacccgagtctttctcctctcacaacctctcttcccaggagacagagcactggctggccttgagagtcacattatattgcagtgggcagggcacaggcacacatacactccagaaaaccatgtgtgacctacacaatagacacggaagcttaagagcagaataaaggggcaatcaaaatggggtggattcctaaggaagatgattacagagcgcgaccttcaaggtttggaaagacagcttgatggggcttggggaaccaggcagtaggtgctgagaaaatgcttagggaataggaagcaccccaaggaaacagtgaagtgtagtggcttgtattaacacaagatgtttggacaggacrgagttggtcccaggcctaagaaagcggtttagaaatgaggcagtgttygctgagtcctttacaagatgcatcattagcacatgacggaaagcaattaacttgcttcttactcatatgctgatcaagttgcaactggaaaggagtttgcacgttgtggggagggggtgccagggaaccagccagtggcccttacaccatttcccgagggatgccgagtgtgagctcagggttggcggatgcccagggaatgccatcagaaggccctctccactagcagtgccccgcccccacaggatgctcataaaagccacgagaccagggctctccagccacctgtcttctccactgcctgtaccagcccacctcaggtgccttytcgccggccttcctcacccaccatgtctcggcagtcctccatcaccttccagtctggcagccgcaggggcttcagcaccacctcggccatcaccccggcagctggccgctcccgcttcagctctgtctctgtggccygctctgcagcagggagtgggggcctgggaaggatcagcagtgctggggccagctttggaagccgcagcctctacaacctggggggtgccaagcgggtctccatcaatgggtgtggcagcagctgccgaagtggctttggtggcagggccagcaacrggtttggagtcaacagtggatttggctatggrggtggagttggaggaggcttcagtggccccagcttccccgtgtgtscccctggaggcatccaagaggtcactgtcaaccagagtctcctgactcctcttcacctgcaaatcgaccccaccatccagcgggtgcgggccgaggagcgcgagcagatcaagaccctcaacaataagttcrcctccttcatcgacaaggtaagcaggggcttcatccacccccttgggtttgggatcaaataaactcttggaagrgccatcccatggggggagagcaataatgcaatgaccccactgtgggaatgagcactgttcagcacgggctcccaggggctgagacccttccaagtcaggccagcttgccccacaggacctggtagaaatttcctctctttcggagccacatgggctggttcagtcaacaccaagggaagagttttgttgattctctacaggagagttgctgctcagcaaactaccctaacccagagtaggtggtgttgagaaacttaacccaagagcagctccccaacagaagcctctaggccccaccacccgaatcctatgcaagccctagggaactttgcggtagctccatggactgcctccttttgggttggagttgtcagttacattattgtcaatgggtgccaagtgaaaaaaatatctttttcttctctcccttattaataggagtgtctaactctgcctctccaacttctcaaggtttcattctctcttcttccctccaggtgaggttcttggagcagcagaacaaggtcctggagacyaagtgggccctcctgcaggagcagggctccaggactgtgaggcagaacctagagcccctctttgattcctataccagtgagctcygacrgcagctggaaagcatcaccaccgagaggggcaggcttgaagctgaactgaggaacatgcaggatgttgtggaagatttcaaagtcaggtaagtgggagactggcttctggccacacacagccatctgaaggctcctttrtgtgaggaccagagaggtgcaaaggagcaaatgccgatatcagccgggagctttggaactgcagcctttatcctgcaaggtggagacagcactgtgtggggtagcacaaggaccttcatcttgtgtattgctatgaagatcctattcctatttgttcacatgactgcaaagggatatcaacatyatccgacaaaatattgctactcactctagaaatcataatgtaatttcacagtcagcatattgtttaattccattggacatgggctcaattattgagatggtttgcatttccaggatggcattcactgtagagtgaagagaggtaacaaggaagagtttaaaggagggcaatctgacttttcttgtggggggaaacttttgactgcacatcatccaggctgcagtaggtgaggtatccagtggaaagggatttggtccagactaacccattagccagcttgcccttatttctaagcttgagctacccctagttacaaaaagcatatttctcaggggccaccctgaggttcagtgaaaatatatcaaaatctacccgaaacagcctgctgaacagataaagtttactccacgatttcggtagacacttgaggtggaaaaacattttagattagcattgcatatctatcaaaagatggagttgcataagtatatttttgtattcctttaagttccatgctcaccttctactcttagaaaagtttattaaaaactagcagaagaaattatcccccttttatggagggagaaatagaggttaaatgaatcacccaaagtcatgcccaggtcagcagaagagctggaaatgatttgagggctcttaactcttgctacacyagcctggaaagagttcaatgcagacttgctcaacagcacaccccccgctctgtccttataggtacgaagatgraattaacaagcgcacagctgctgagaatgaatttgtagccctgaaaaaggtgagtggggatgtttctctcaaaggagaaggtttaaaatggaatctggagtgtggggtaacctgacctctgacccttgggccacccaagaaatgtcacatcaaccttsagaatatctgcagagttcaaacctcccaacatgttccctctacgttgatggccccattagccctacttgggtttctgtgagctcagggaattcaagcccccagttctccgtaattacccatccccaaccccaaatcacccagacccagagttttctaaaatccaaactagatgggctggggagaaatctgctcagcttcttttggactagatacttggggctgcagactcaaaggagcatcctgcgctgtcattccaggacgtagatgctgcctatatgaacaaggtggagctggaagccaaggtcaaatctctgccygaggagatcaacttcatccactcagtctttgatgcagtaagagtctgcaagtatttctgtctctcctaggtctggagcctggaaagaaaaggatgatgcattgtgccattcattcattcagtgcctctgcccagcatcttgcttggatacttcaagctggggcttgggtggtagggggaccagggagaaccacttggagccttgtcatactaaactaccccagctctgatgcttctcccccgaactcccttatcccatggcaggacaacatctaacaaggagagagtactgattcccaaattctaggacactgggtaatttcccaaggaatcaacacatacctgctcccttccccttccctgaaaagtattaaaaaaaaaaaaggcaagctgtccctcagctcattggtcagggggcttcctaccctttgaagatgcctcattctgggcgctacccctccaaaggcagagacctgggtctgtggaaagggagagagaggtagaaagtgatggagtcacactgtgcagggggaagcagtgtcccagatgtccccaatgctcttaaagaagccgtttatgttggcatactgaacagacacgtgtcacattcaaatctatgtaattccaattcagaggatgcttacccaccctcatgcctggggaaagcacacagatgggagccttgagaagtaaggctgggaaagattttcaccacactgatcttttgggatgaatgggaatacctagggaatagctgggagaatctgccaggaataccaaggaaaggattcctgacctarwtgggtagttaaccacgaagatttaagattcttcatcttatgccttggtgatgctgagtttactgccctgcaggagctgtcccagttgcagacccaggtcggtgacacatccgtggtgctgtccatggacaacaaccgcaacctggacctggatagtatcatcgccgaggtcaaagcacaatacgaggacattgccaacygcagcygggcyraggctgagtcctggtaccagaccaaggtgagcatggacacctccatgakaggttccagggttagtgttctctgaggctccacattatcacttaactcagcctcaggaaacgtgtgagcacattcgtttatttcaacttagcaggmatgtctttgatgctatgacaacttagcttgaaatgcatgtggaaaccgaaccagacacactaatacatggtcagcccaatgctgggagctcaggacatccactggccccacattcctcaagatctgggtgggagcagggtgagacaccaggacaaccgagacacagtcatgaagcagtttctaaaaggcttatttattctctatatattttctgagctcctgctgtatgccaatcagggttacagggttgcaaataaataaactgcaaacagagaacccaagctctgggaggccatgaagtgaatggacaatcatggaagggaaaagatagcatgaataaaaagcttccaggaagacrtgggggctttgtacagttgggaagccatgagggacaaaagattgctgaggagtggggagaggtttaaggctgaacaaggagctggcaggcaagaacaagcaagggagtttatgtcaggaagaggaaggctgggataaacacaaacagctactgcccagagctcagacagccgcaaagaagtttggctttgcggggtacaattgacccatgataccagctccctgtcaaatccagacccctcttggggcagcttctcacctacgagcaggttccaactctttccctgctccatacgttgcctcatcccttctggtcaggagtgtggtggaaaggaaggtgggtagcagggaccagggttccacagggcagaggcagcgccttgacggtgaaaggaaacatgatgcacttaaccccaaggtgaagtggttgaaatcgatagcaaacgattcctcatgttgttgggttgttgctccatttaatcatgtatacctagaagcgggaacctgagctattcagcactttcaagaaccccacagatcttgactctggcaggggatctccttttgtcagggaarggtgtaggtttcacttcagtctgctggaggagacagggtgtaattattgctcttaaattcacatgtcctggataygcaccattagattgagaactacctgagattgggaatacttttacaaagtcttcaaaattgtgccttccacagcctctgcaccatcccacaccattcccccatatctcctccctgtttccccagcactggtgtttggagggctaccaaaattcatgggcacagttggtctggatgcacgctctgtgaccaggaactmcccagggaccttgatcaaatcaccgtctcactcctagaactcaccatgttccttccctgacccagrgtcttcatgcaggctgtttcctttgtctggaatgttctcccccacaactggtcacttaggtccctccttctcatccttcagaccacagttcaagcatctccatctctggagagacttctctgaccaccacttcccacttccaaatctaggtcagattccttcattacactctcccaggaccctgttcatttcctaagggcacttatcttagtgtggaactatacatttgataatatgctaattcagttaatgtctatgtcccccaataaactgtaagcttcagggggaatgagtgaatgaccaggaatgaatgagcctgcttgtggcacccaggrtgggtctgtgtgcacagcgagtgcctgggccaggcatttgaytcagtgactgggtttgctctggttctctcagtacgaggagctgcaggtcaccgcaggcagacatggggatgaccttcgaaacaccaaacaagagrtctctgaaatgaaccgcatgatccagaggctgagagctgagattgacagcgtcaagaagcaggtaaagatttggcagggccaagagctcctcaaatgctcatttcttctgggsctttctgccatctttaagaactcctccccargaagcaccacacctccatgggctgtcagcaggactcatggcttcctcctgtccttacagtgytccagcttgcaaacggccattgctgatgcagagcagcggggagaactggctctcaaggatgcacgggccaagctggtggaccttgaggaggccctgcagaaggccaagcaggacayggctcggctcctgygtgagtaccaggagctgatgaacatcaagctggccctggacgtggagatcgccacctaccgcaagctgctggaaggcgaggagtgcaggtgaggcagatgcaccaacttcatcctcaaagcaagttgagctcaccycagcttcctgggcattcctaggggctcgggctgttgcagccccttcttctcctggaagaaaatgcagttcagaattgggctatggcaaaaaaataattttaatttccttccaggctagtaaatcatttgaggtgcaactacagttagcatccccatagaaacctaaaacctgatcaggtctaagtaactgaattctaccaaaggagacatttggttacatggcagctctcgaaatgtggtctaaaaggccatgggctgagaacaaacagtcctaggatttgggcttacagatctaacactaagtagctacataaccttgggaaagtcagtctcccttctctggccctcaatttcttcaatgataaaatgaaaaggtcagattacatgatccgcaaagcttcatgggagctttgtgctctgccagttaggagctgtgtagccaagagcagatacttaacctctccacctctcagtgttctcatccaataaaatgtgaataacaatagttctaaactctcacattattaaaagggttaaaataagggaatacacacaaagctcttagaacaatgcatggtacacagcgtgttcgataaatgttagctatcattcagtttcatggccaaagacataggctttggtgtcagatgaatctgtcttcaagtccagctttgcgactatgggcaagttagttaacttgtctgagcttccatttctccctctataaaagtgagcaaataatacctacctcatggggttgttgagagaactaagtggtgtgatataagtaacaggtaatcaacagctgttacctcttgttaagtttctcagtatgtgtttatgaatgaatgccagttctgtcctgaagatgctaaagcaaagttacttggttgctaagataataataaactgatattactattgttatttttatgactcagacgcctctccacacctatatacaataagctcagccctggctcagtgcatgacaatggtcccttgttgagagacaaatcttattataggacaggcccttctttccagytgatgccagtatatgattacttttaatttccttaaggcatctaastagtttaaaccaaaaattgtatttctgagattatagattttgctcctgtgaacctcaaactccaccttattttattcattagattattaatattatctttaatactactagttctcaaataatttcaacctgcattacttctgcaataaaaataataaagtatgtttaaatgctttgtcaacaattacaaaagtgtcattgcaaaggcccttaagctgctggccacattggtaaccttccttctccctgctcttcccaatcaggttgagtggagagggagtttctccagttaacatttgtgagtatgacatacttcttgggccatttggagtgtgtgtggtagaggggatggggatgtggtgggcttgccagagggtgaagatatgacgggttagacgggatctcacagacagcgttcatttggagaaggtttgaggttttgggtcccttaaaaagcaagccatattaggagtctttaatgtcacagttctttcctctttgagagtgagggtgtcacagaaggggtgatgagaggtttgatgtcattgttctgagtgggtttaaaagatcctggccacatctcctacctcccagaattccctgcctttttgttggggctgcaagcctagcacagaggtgagcacttgatgtagaygggatttatgaaaattcctggtctggcttggacctttgaagggagccttcatgctgtggacaagagcattgccaactaggcagcttctctcctaaacagtttgagaagaagctccactgcttggctcaactctgccgagtataactgcagaaggatgccaagggttttcaaggcagtaagggcagcataaaatatggcagttggctacagtagctctaaaacaggagaggtattaacaagctggcatggccctgtgctggtgagagaagaagtggtcattcgcagagctcagtgctggcatcacaagggcaacagaaatgactcttacaactcaccctctacaagtgagtttgagtttggttttcttgatgggcattcataagggcaattcattatattagccaatgattctagaaggcagagccctctgaaccacccaggtgtccttcctccctgatgtctttgtctagtggtgccagagaccctcaaagctaattttggggacaggccttcaagcataaccttgaagctccttttctcttgaaaacacctaattgtctgtattagttttccagggctgttgcaaaaagtaccaccagtcaggtggtttaaagcaacagaaatgtcttgtctcacagttccggaggctgaaattaagggttagcagggccctggtccctctgaaacttggagcctggaccagcctcctgctctgtatatcatgcagggtggcactatcccctctccaaaccagatagtgttctggaacacggaggcagcatgggcagcccagcccccctccagcctcctcctagctctggcggtggccatccatcctcggtgttccttggcttgtggctgcatccctccactctctgtttctgtgattgtatgaccgtgtccctgtgtgtctgtggcttcagatgaatgtcttccttctttctgtatggacaccagtcatgttagatcagggcccaccctacagactttatcttaacttggttatacctgcaacgatcccatttccaaataaggttgcattcacggatactggtgttaacacttcaccataggtttttgaaggacacaattcatcctataacggagtctatttttttaaaatttgattttccttcggcaggacccaaagtagggtgctagaatgtgtaaggggatgagttataaattaggagaagaataggttgggaggagaacgggggcagagttcactggccaacaggttaatctgtcacttgatccatcaagaatattccagcctccaccctgggattctgagtgtggggctgggagacgctgagggaagaggagtgtgcccctccccccataagcatccagaaggaagagaaactctggagtcaggctcagacagggagacagacccagacggcacagcaggaggatcaaagggaaagcaggtggactggagctgcttccaggaggagagggctccagtaggttctggaaggggaggaggaagccattccagcctaagaggctgcctggagctgcagctcaggaacacaggcagtgatctcactaagcaggrgacattggaaggaggcaaactgctggctgacgagaccaccccctccccacccaaggactccagggcacaggccctcacactcccagctgtcttctcgcttgcacttgatctgaccacacctcctctcttcccggcagctgtggtcacctctactctttccagtggctatggamgcggcagcagcattggaggtggaaacctgggcctcggtgggggcagcggctactccttcaccaccagtggtgggcatagcctggrtgcaggcctgggaggttctggattcagtgccaccagcaaccrgggcttagggggcagtggttctagcgtcaagtttgtctccaccacatcctccagccagaagagctacacgcactaagagagccccatggctccctctaccctgccttgaggcctgtttgcagtcacacctggacaccagggtcctcctccttcctctctccttgtaaggtgcacctgtgctgctgggagcctggagtactggctatacccattcccaggcctaagccagcctctccctcctgacagtgcccagactgccagcagcacccgtctgttacacatgtgaaaccaaagcctgctctctccyaaggctctcattcagcctatcttgcgaggcccgggcagctggaaagtcctcctccagctccacctccctccctccctccagatgcagaggctggggagtctctcaatgccaggttgtcacccacctgtctcatagtgtttataagtggcctgctgggagtgagtgctccctctgttccctccctggaatgtgtctattaaatgcatgtgtcayctgtttggtgtctggccctctgtttggaatggtgactgacccaaagcaattctcctcctctcccaggcctgctcccagcatggggatcacacaaccagtgctcagaggcatcacccttgccccttccctctgagctaagaaagctggctgggaggaagggagggcgggctgcagaggtgcagggagtgcagggctggccagacttccttttccctctccttggcatgccttgtttgggaagccggagctgttgggagaagcccagaccggcctccctgctctgttagtgccgtccccattccaaaccagtgttccagaatactgacgccgggtgggcggcccagcagaggggctgatttttccctgacagtttcaaacttgcagacccagcagagaaataacaggccacgaagaggagttaaaaggcagccctgggagcaacgctttcaccaaggagaggagccatttagcccataattgcaggcagcagtgagatatccagtaagctcccacattcctgagtttacagtctcctggacccctcccatcaggcctgagctggggcatagcccagtgggctcacccagagtggggcagtcgatgtgggcttggagggagtgagttcaatgctcaggaactgatgtgagctacttgggacagggttctaaaacaccyttgtccagggtgaaggagcaggaagtgaagtcgggggagagggaggccgtgaatcaggagggaagatgagtgtaaaaccaggggctaaaatttggagtggacgggagagggaggacggcaggaaggagagaaatgacactgagaacaattgtgaaatccctggtgttggggtgagggcgagttcagaccaagagaggagagaagtggagggacaggaatttgcagtgacatcctcaggctttctccactggccaagctggctctcatctctgagcctgatcttcccaactgtgtggggtgcaatgattcagggcatgggaccaggagtccgggttctgacaatggccccagtgctcactagctatgtgacctcaacaaacgtgcctaactacactgtgtctcaatcggcctcctttgtcaaacaaggatcttaacggcaacccctgtagtgctatttcagattaaagaagatacatggaaaccagctacccatagtggctgctcaaaagatattcaaaattgtccttatttttatcatccaccctcacaaagttattatgagaattaaatgaaatcatgcttgcggctgacctgtcgtgtggtgtggcacagactgaatctccaataaatgaatttttagaaatcataagtgaacagaatgggaggagcataatttagtgactttgggttcagagcccaagacctgggaatagagaagggagttcagatgagaggctacaggagtgtccacaatgtgtggctgaaagcctgcgtgggtagggggcccggaaacccccaggcctgctccaagtctgctccagactccaatccccagatcttgtcctggggactttatttaaggggaaaaattgtgtgtatttcccaagtctgtcttccatgctgaggtgagataagggttattcaagaaacccaaactggctgcacaagaccacaaaggactcgagagagcagacagaggaaggggtgtgggggctggccctaggccacacagctcatgatggacctggctggggacatacctgcgtcctcacaatgcaactccagtgtgacccattgcagcattcccagagtatatggacaactgagtccagattctaggtctagagagatcatgtcagaaagaaaatggacatattaaactttctgccaaggacctcctgcccatttaatggaattcaaaacttcacccagtaatatgatggtggcgtgttcttttcttgaattatcacacatgcacctggttggtgccagcccctctgactcttcctgcttctcccctctccaaacaaaaccatctgtcccccaaccccattgcaccaacatctgcttggctctctatgttccaggttccttccaggctgaggaagaggaggaagagcctgccacctggactctgagatccaggttgtgcagagcctccctgcactgttagggatcccatatcccagagccctctgggaggctcctgcatggaagctctctcagtctcttacctctgactggggcaggtgtggtttctggaacaggagaacaaagtcctggagactaaatggagcttcctgcaaggccaaaaaaccaccagggccaattttgagcccatgtttgatgtccacatcgacaacatgaagcagcagctggactgcctgggtggagggtatgtgaagttggatgtggagttaaagaacatccaggacrtggtaggggacttcaagaacaagtgagcagacgctcagccagtgcctgggccagggtcctgccctggggctccaggggaggtcagagggggcaggagaaacagcctctgctctccagaaatgtccagtctagtggggaaacggaacacacttagggcacagaggtggaatcagaagtaaacataaaagtgtcaagagaactgggacccaccctgtggtcaagaatgctgaggctttagtgaagggctgggattgtagatgatgatacctaacataggtacaaaaagcatgatacacacagcattcttcaaactctgcagataaggaaagtaaggctctgagatagcataccaaagatgacacaaagtggcaactcaggagttaagaatgaatcccatagaatctcactctcacatgaatgcaactaaatctcactgctaatttgcacagtgttcacatattcactctaatccaggcaaagaggctggagaacaaaaaagaaaggacacatttgctgccttctcccaggaccacacacacacacacacacacacacacacacacaccactaaacataatgagatgctcaaatgctcatgcctgtagatacaaatttcttgattttattgtttttacttatttttatttcttatttttctggttctaattatttttaattctcttggtctaaccaaaattagtaactggatcatgagttttggttaacactgtttgtatactctagcacaagttcaggttttagagttgtgctgtccaacatagtagccaggagccagtggccacagatgactatttaagtttaaattaattaaaattaaataaaatttaaaattcagttcctcagtcacacttgccacatttcaggtgttcaatggccacacatggctaatggatcctgtaatgaacacagatacagagcaattctgttatcgtggaaagttctcctggatagcactatagacttcagagtcagtggatttaggatcttggctcaaccacttaatggctgaatgaccttaagaaaactatttaatctctcaaagccccaggttctttatctgttaaaagagacatcaatagtgcccacctcacaagagcattgagattattaaatcaaaacttgcatgtaaggtgcttggtagggttcacagtgcctggcacatagtaagttgttaataagtgttagctatgtttattgtatttatgattaggtatgtgtagtgatacagacgcagacaagagaagcaagtgcagatgggtaatttataacatgtatgcaagcgtggactaacagtgtttcaatacaagaagacttcctggaggagaaggctaaagcttagcattgaaaaggaagaaggcacaggggagggatatggtagggcatctgttgaagagtgtgttcctagtcaatgaccaggcagtgttcctgtggcatcaaagtggcctgtgcagggccaggcgatgcttgcccttcagcagagggactgtgagctgggccacatggaagacgaggacagttgtatggagttaggtgaagaagagacattcagagttcattaaaaggcaactcaaagaaacgatgaggaaaaccaaattgctcttcccagagaacactgagagaaagcacaatactgaaatttcaatggcaagcaagagattttctcagatcctatagagcagcagaggaaatataaaagccaggaagatcctgcttcatgtaagtcatgtgtgatgggactctgtggttttaaaagaatgacaactttccattacatagtagagaaagatcctctgagaggtcatatggctgatgggcagagcagctgagatcaaaaccacagctgtctagcaccacgagggtggggtgtgctgatgcacccaagtaggttgggtggrgaatgggtcacctggaacagaagcaaaacttccttcccagagatcagtgagcaggaggcacctccacatgcccctgggggacagacagggtggggttgctgcctacaggtaaattgaagaatgagaaacctttgggggagagggttcctatggtcctgaagtctctgctccttaggccacagttcagtgtgcctgaacagagtgagggaaatgcgagtgttgtacagtgaggggctgccggcctctgacctttctccctgttcctctcctccctgccctgggttggggcaagaccataaaaaaaaaaaaaaaaaaaaaaaggaaatgtatatgcccctttatgggacccaaatactccaaggagctgagctgtgagaaaagaaacctcaagtagactgagaggggatctgttttgttgttttgggtttgggttgtgtttggtggtttatttgatttgggatttggggccatgtgtgtcataggagagccaggctacagtggagcatttgctaaggctgctctgcagacccaccattgcctgtccacctccaccctactgctctgacctcactaccagcgcccaatccaaccccaaaccacttcttgatccttcccagaggtatgaagaagaactcaacaggtgcactgaggcagagaatgagtttgtggtgctcaagatgagtggacagagttcctcctgcccagctcccagtggcctcatacaaggccttatttaatttgcacagcaagcctagaagtaggtcttactttaacagtgggaaaactgcaattcagagaggtaaagacacttgcccagggctacctaggtaatcaggagtgagtcaggacccaggactccaaagtctgagctgcaaatcccaacaccagcccccgccgtgtggagtccagtgtggagacaggggaagcaaaacgggccttgtcctgggctgggtctctaggcacccagtcaggctcaggaggacagggcagcccagaagcagctccacggagtcctgggccttcctgcttggtggccagggccagaacagggttgtcctcacaatgtgaggtgatgcaggagacctttcaatgtggcaccagagctgatgrgcaggtgggcacccctgaaggccctggtcttcacagagtttggaagttctactccctccctcctctccaagttctaagttctactccatggcctggagtagacagatgctctgtccttgggaactgaagctctcccacctaattcacagacagagggggctggttatccctggaagggtaaggcccagagtgatagcatgttctgtgggacatggatgctgtctacatgaacaaagtggggctggaggccaaagtggatgccctgatggaggagaccaacttcctgagcactttctataaggcggtgagagtgcccggtgccccctccaacaggggggctgggggctgggtcttagagcctcagctgggcacagagcctgtgggctccttccctggtcttctctctgctccttatcccacctgcgtattgcagggcagatgccacttcccctaccacaggagaaaatgaggttccatagagcggctggcaggtcaggagagatgaaaaattcagccttaaccatctggatcaagcatgttctgttgggcaggcagaaaaatggaccacctgtcattaaaatatgg

SEQ ID NO: 6900 - DNA, 18750 bp, Homo sapiens
tggcgagccaatcctgccacatcagctctggctgcggggtcaagaacttcagctcccgctctgccactgtgcccaagcctgggtatcacagctgtgtcagtgccatggcccatcatggggtcagccctggggggctaggctccaggcgcctcggaggctttggcagtcagagcctgtgtacggtggggtctccccggatcgcggtgagttgtagatggcccctacacagcaggggcaggtttggctactgggcagggggcctttgcaggcccagcccaccccgcatcacatctgttaccatcaacgagagcctcctcatgcccctcaacctagagatcgaccccaatgcccagtgtgtgaagcatgaggagaaggagcacatcaggtgtctcaacaagtttgctgccttcattgacaaggtgggtctgtgagctgtttcctgggactgtggcttaggaaggggaaaggracttggaacccgatgatagggtggttctaattctcctgttactgactagcacgtggctgtgagaacgtggctgaatcagggtcttggttttcaaatgttgccatgtcagtcaaatgcaaaatgaatctgaaaccaccagacagaagaggggtgtttgctgctgctgctcacaggcaagcagcaagcatgatgtgtgtgcaccgtccatcttcccgatctcaccggcacgcagtaggacagtgtggcagagcgggccactctgcctaggcctgtctgacctcccgcttagaggagatgctaccgtccctagcatggagcaggagccaggatgcagaggggtcagaggctccttgcctgctcctccgtggtggggacatcataggaaggctgtgaacccttaggacttctgcccgaggcactttataccctgcagcacatgcatagattaaaggcagtgagttgagaaacttaaagcatggtccagggagaggctgttgaattgacttttctgatgctgcagtttcagagtcctcctggttgagtgtatagctctggtttcctttaacctaatgatgccctccctaggagctcacagtctttgggggaggacagccaccaaagtttaaaggaggagaagctcgtcttccagggctgaatggtgtgtatatctacacyctgggactgcataagaaggcacaaaccagggcgatggtgggtggaagttctgctctcagatcaacgctacatcagaagtgggcatatctgcacacagaggtgctgggtgtccattgttaacataccgctggctgtccagattactcttcccttccatcagcacaaagaagctcactgtagagttaggcaggttattcattgcacaaggacacctagcaagagcaggggaggttgaaatccagcccaggctttgcttgcagagccatgtgccctggcagggggctggaggcatcttttcctaatttgctcaaaagcacagtgagaaccctgagagtgcatgctcaaaggggtctctgcatgtggccttttgggcatcacccatgaatgctgctctctcckttgagaggaaccagttctgggtctggggagaggaacttataccactgcaccaggctggcttttccctcccttggggttgctgatggccaccctcttccctccagccttcttcctgcaggctccaaactgcattgagctccagactacaaagtgcattgatatggtgggtttaatcctgccagagggctgtcccatgacctgggtctgcatgttgaaatccaaggcagatgccttttggataatcagagtttttgttccttgtccctcaagcacggacaattggacagttgagggtttgtaccaggcttgtactcccaagaggttagggttggagaagaaatcacctgctttagggctggtaaatgcaaacttcaacgggggcttggtgggtcacatgaatgaagccaaacttgagaggcatgcccacctagagggacagtagctgctgctcactccagccacaggcctacctagccttgccagaacttctggtatgtcaagagggtcagagagatccagattcttacttgaaaccactcagttattaagtgttggcaactaatcagatctctataaaacagtgtgcaaggcaagtaagacatgcctgtgggcctgatagggcctggagctgccagtgtaccactgctaatgtatttctcctgtcttgttttacaatgcaattcagtgagaatgaggcaaagtggtctggttggtggcagagttagagtgagaggtctcctaattcctggtctgggatactctgtcctgggcttcagtgccccagcaccagaggtaaggaagagtcatggtatgtacatttaaaaattgctgttgtacaaatgcccacaaacttagcaacttaaaacaacacaaatttactacctaaaaggctgatgttaaggtgtcggcagggctgcatttctttttggaggccccaggggagcatctgtttccagggacatttaggcttttggcagaattgaggtccttgtggttgcaggactgaggtccctgttctcttgctggctggctgccagaggttgttctcagcttccagaggctatccacattccttggcttgtggccccctcttcctccatcttcaaagccataatagygggttgagtccttctcatgtttcaaatccctctagtgcaggcacctttggggggatcattatttgcctagtatgcatagtatgaaatatttctgcaggatgttaatttcattctgtgtagaataaacgaacgtttataaatagtgtgctctttctgggaaggggggtgggtggagagaagttacttggggactacttgtgacctgcactttcagactttgccaataatttggcctcctggggaaggtcacaggctgctgcagggcgggggccatcctcaatggcagaaagagctctgggggaccaggcaaaacctgctctcaggctttcccctcagtctctttcctccttcctgaatggcaggtgcgcttcctggagcagcagaacaaactgctggagaccaagctgcagttctaccagaaccgcgagtgctgcgagagcaacctggagcccctgttgcagggctacayggcgactctgcggcgggaggctgagtgcgtggaggccgacagtggcaggctggcctyagagctcaactgcacgcaggaggcgctggagggctacaagaagaagtgagcatgacagggctgggatggttctaggcagtggagtcagtcttagctgagatcacacaactcctccagaagctgagactgctgaaggccagggttgccctgacaagctatcagacacttctgctttaccgtctgctttatctcgtgtcagctcctagttcttrcacccctgtgctgggggctgggaaaagatttagagaagagttccctgtctgggagggatgggacacacattcagggtacagactgatgcagagatgaagagataggaacaaatgaaacaggaggagcaaggacagcagggctggagaggaggagcccggagcagtcagagctaggacggggggaaagggaaaggccctggagaggtatctgaaaatgaattggctgaagccattccaagtatctgatgaacttggattcttcctttatttattctgcagataaaccatcaggttatcgttctgcagggctccacaattcaaataccaatgtaaatttgggttttcctgagttatttagcttgttcattacctagtctaaactcaccgggtcactgtacttaccttgtagatacagacagagtgaagggtgattttgacctcaatcaatcctggtaattccaaccctgcttgggattcttggaagttcaggttttaccatctggctggacccagcagtgggtcctcatgtcccttggggtgaagcaaatgtagacacaatcctcagtgtgcaggcgtcaaggtctgtctcccactctgggggtgtgcgggctggtaattatagagctgagtgcttactgtagccccaaatgaccatggaattcaaaagttatgaaaacaggccgggcgcagtggctcatgcctgtaatcccagcactctgggaggccgaggtgggtggatcacctgaggtcaggagttcaaggccagcctggccaacatggtgaaaccgcgtctctactaataatacaaaaaaaatttagctgggtgtggtggtgggcgcctgtaatcccagctactcaggaggctgaggcaggagaatcgcttgaacccgggaggtggaggttgcagtgagccgagatcatgccactgcactccagcctgggcaacaagagcgaaactccgtttcaaaaaacaaaataataataaagttatgaaaaccatgctctgggctctgggaactctggtcttctttgtgggggcagggctgctcctgggctacaatctcacaggcaggaggaagagggctgggctgctggaggagggtgggggaatggcttgaagaaggggttgcttctaggaattcaagtccttggatattggggcagggggaataaaacctcatgggggtggcttcatagagctttgtgttttgtacagtgtagaatttaaaggctctgtggaatatctgtctgtttttaaatagttccacaaatatttattgagtgactcactgcacttcaggtgatttagaccaagacacaaagagattaaatgtcttgcttcaggttttgcagcaacttcagttaagctgggaccagataccagggacctggacttcaagtccagtgtccttccaatgggttctttgtggctgggaaatagaagtccagagaggcaaarcctcttctccaaaggcacagagaaaggagaaaaccagggagtttggcacacctgggctctggcctggccaggtcctcagtcccaggggcctttccacctgggttgtttctcctcaggtatgaagaagagctggccctcagggccacagctgagaatgagttcatgatgctgaagaaggtgagtaactgttctcacatgggaagaattaaatcctggacaccggacgctctgatgctgtgggccctgtcaggttcccattagcccaattgttggtggtaaggtactggagcccctggcacaagaaggtgggttagtttggttgcagaagccatcatagagcccatgcaggaatccagacagtgccgatagagccttcataaaaagaaaacctcaccatgctcctgcttgactttttttaaactactggattggctgaaakgttcaattttaattccgtcttggttttttgcgggcattgcctccccctgttatccaagactaggggttggttctcagcttgttaatgatttcaaagtgtgaccatcattcagtgcaattggtgatgatggaaaagccctggggaataaaactgtgaatggtttcccttttgtttcatgttgctgagtgaaagtgcatgtgaatgttctttaacaagtaatgtgcttgcttgccagcctccttatttgtgagtatcacagggtggagtgaaggctggtgacagatctgccaatagaggcttggccttggtctcaggcaggagagtcagctatttgagtgctggtggtttcctggcctgggctctgaggacaacctacagagaggctctgtgactgtcrcatgcttgtrctctgtgggtcagtctggctgggaggcagcagcctgacgttctgggccgtggtatgaggcttccttctttggcaaggtcctcggctctccacttcatttccccaagtggtctcatttatgcaatgggaggtaacgtcactggcagacaacaaaggctctgtcccttctagggggtccctgaaggtgaagatcagaagtctaggttagacttgtaagtgmagggtggctgggcagggtcaggccagaggcagagaggtgggccaggaggtggcctcagggcccgctgaggagagccgaggctcaggggcacagcgagggggacaaaggtcactccacatcctcttgtgtctatctccaccaggatgtaggctacacctatctgcacgagacggacctggaggccaaygtgagccgctgaaggaggagtcagtcttcctgcagtccctctacggggaggtaaatctctccccatctctggaagagcaagtgagagaggrgacaggggagggtttccttggagtgtggcctgtcctggttcctgggttctaggaaagctgtacattcttgactctcctaggcctggatatttttccttatgtgaccagaggggatttttctcttgttcgggtggaactgggtgatgcccttcctttaagatgatttgaaagaaagtggttaattcccatgtcatgaagtggagatctgacaattaatttattaatttaggtagtgtaaaaacccaagcagataatccaggcctctccctctggccacaatctggttgattagatttgtgcatagagctatagctgatctggattattcaggccccaaggcggggtgagccggggtgayggcatacacataaatccagctctgttgatccctgtattagtagaattccacgttactcattgctttgaggccacagtcccaattccagccttttcctcttagaactacagtttttaaattttcctgacttgctggtagttttctaatttcagagttgggatatttttttttttttttaatttcctgagaagatagkatcagaaggggatttggagttgagggcactggttgctgtcttctacaggaaatctgcctccttcaatcacaaatctctgacacctccatggtggtgaagatggacaacagctgggagctcaacatggacttggttgtggcttagatcaaggctcagtatgatgatattgccagctgcagccgggtggaggctgagacctgataccaaaccaaggtagtctggagggcagggcagccccactgagacaggaggatagctgtgagcctcgagtttccctgggaaacgcactcctgcactctagaggggctgccgctgaggtcctgggtagagcagggccagaaggcgggagagctgtggaacagtaggctggctgattgggtcggggacagcagcctctagccattgtttctgygtgtttgcctctcaacctgcagtgcgaggaggtgaaggccacagtgayccaacagggtgagaacctccgcagaaccaaggatgagctcaacgagctgaactgcatgatccagaggctgacggcagaggtggagaacgacaagcagcaggttggggggcgccgagaccccrctccatacacctgccacttcttgtctggttcctgcttccctcctatcttcagggactgctaccatttggagaggcgtgtatttgaactgtgccagagtacactactataatcagcatgcaagggctcctgttccaacacccactattatcaaacttccraattcttgtggatctgataggtgtaaactggcacctaattgttattttaattttcatttctttggttaagtagtgatatcaaatctttcctcatacacttactasttatttgtattccccttctaagacctgtctactcatatatctgcccatttttctattgtggttccttccttttttcttagtgatttgcagtattcctttgtccattctatctggattgtaagcctttgtcagtacacatattgcaattaactttctctcagtctatcacttgtctgtttgtcctttattgagcccaaatctttaagctggatgtgcccaaatccatcttaagttcttcctttaatggtttagacttagaaggtattgaggtaatagaggtagcctcttaaatttctccccccgttagttttatagttttacctcttgcatttaggtctgtgatccatctgaactttattttttttttttgtatacacagtgagtagggttctaaattaatttttctacatatcataagaaaatagattatgtaatccatcctttcgccagtgatttgtaatactacctccagcacaacacagtgctcccacacatgcctggcttaatctctgtcttctgccttctgagttgctgttcttcatcactgcacaggatgtatcattagtaatttgttgtggttaagacctgagtaatgaaatatgcgagtggtttactttttagatgtgaaattagagaagattcgaagttgtcccgtgataacagtgcttttgttcatttgcttctgwtatgctttcttaagcggggtgaagggaggggctgtagttagtgtgtccggagttgttgcacatgggagcttctttcagcaagatgatctcagcaggccaaagagtgagaccctgcacagtggcctttgaatacctgagcttggtgctaattaactgcatagcttagggcaagtcacagctttttggagtcttaatttcttcatttgcataatgggaacaataatgcctgtagtgacaagcttgcagaataactttgaaggtcaaataagataacatctatgaaagtaccttgtaaacgaayaacggtatatacaagtataaggtaatatcactaataatgatcattcctatttcagtgctaacatttcctccctctaatggctcacctgccaaactcaagtcagttttatgataaagtgtacaaaaatgaaggaaaaaaatccaaatgggccatgtccctgcctagttaattttccatttatatgtatttcttttaaatagtattaagtttaaaaattaaccgttttgaatggagataaaataggatgaccaaggccactggagacccaccagagtccccacaacctgcaccctttttaaactccttcccttctgtccatccccacagcgctgcaagctggaggctgcggtggcccaktctgagcagcagggtgaggcagccctcagcaatgcccactgcaagctggctgagctggaggacgccctgcagaaggccaagcaggacatggcctgcatgctcaagcagtaccaggaggtgatgaactccaagctgggcttggacgtggagatcgccacttatcgcaaactgctggagggygaggagatccggtgaggacaggggctccagggtcccttcasgttcctactcagagctggactgaaatmttccaggcagagaatgttcaaactgggaaagactctagaaatcatggactccaaccatgtccccattttgcagatagggaaactgacatcagagaggggaaggggcttgcccaagagcacagccagttaatggctcacctaaaatgtaccagtctctgggctggccaccaatgctcttctccctcctgcacggcccctcaggctggaatctggatctcattccaaggccactactttaccctcttgactgaaaggatgtttctgcaatcagcttcagtgggttcttaaagctggaatcattcagaaaattagttaaaggccatttgatttgggatgtgcaaagaatcctatcaacctagatagcctggtgttcaggaccagggaatagaaatgagcggcacaagttctgtccttgcaaaggaagacaagacagacatacatcagtcctccagagcctggggttagtggcccagggaagctgtcacagaaggaggctgccttctcaacagctgaggagaagctatgctgacaatttgagccaagaattgagggcaggtgaagccagtgtggggcagagtgatgcgtatttacacctgggatggttgcatggtcctctggacttgggacggccacatcgttagagtttctagctgggtcccttcagggcggggaggctagactgggtagtagagtatacaggtgaagagcacaggccatgagcccactctgggttcaaatcccagctctgccacttattagcatgtgacctctttgtacctcagcrtcttcagctgtaaaacagagataatcacaaaatccaccttgtaaggctgttgcaggattaagtgagttttaatggaacatagtaagccccagtaggaggaggtgattgtcatgagatgatggccaggctgggctgcccccatgaagagggaactcaaaggcctggttggctttggaaaccttccatgaagcgtcactgatggcagcccggccacgctgctggacttgctccatgcttggctcaagcacacacacttttctgccagcttccttggggctttgggtgaagccactggagttctgtctgcattcggatacttaagcccccaacccactcactagcattcagtgagcagctggcacttgcactgattttcattatgatactaataattaatggattaataactcaatcagaattattagtacacatcccctatccatgtgattttaaagtcaatttagcatattgtgctatgtgtactgtggccattgaccttttaagagactgcctcctcttggcatttaaaatatttaatttaattacataagtaatgctcgctgctgccaatacagaaaataagaaaacaaaagcattcagagccactcaactcagagatagctgtcgccagcattgtggtttgacaggcaccaccacrggcactgtgggttccttgaaagggcacagtcgtaaggctgtggcaatgccagactgagtggcaggaaaccgagccagatgtgtacatcctcactcaaaagatgagtgaagaagtgttttgagctgggcagaatgaggcagggtagagctttcctggggaaaaaggtttgaagtgggaagctacaaaaggggagacagaacagaaagtgcagagaggtgtgagggaggagggagtgtttataaaaagcccactgtagtggtatatatgtctcatcataaataatatccacatattttttgagacagagtctcactctgttgcccaggctggagtgcagtggtgcaatcttggctcattgcaaactcctcttcccggattcgagtgattctcctgcctcagcctcccaagtagctgggactacaagtgcctgccaccatgcctggctaatttttgtatttttagtataaaaagggtttcgccacgttggccagcctagtctcgaattcctaggctcaagtgayccacctccctcagtctcccaaggtgctgggattacaaaaatgaattgtttataatgttggtagcaaacatattggatttccttactatgtgccagtctccattttaggcactttccatgtagaactcaatcgaactttacaataatcctttcaggcrggtattatcacccccattttatgctggagaaattgaggcacagaaaggttaagcgacctgcccaagatcacccagctagtaagccgcacagccagatttaagtccaggcagcctggcttgagagtccaggctcttaaccacaccatactcttcagcctccctctgcattgaatgaaatcagatagatgtctggggtaccatttaaaatcatggtataaaaatgaatctgtttgagtaataggcaagctttttcctgctcagagacgtctagctaggtagcagcagcttccatcaccactttggctttgctggcatttccagccaagggaccaggaggatgcccccctcatctctacttcccagttcaccaaatttccatggctgaaagccaaacatggcataaagtggcattttggatcctgtaagctaacatactcctgtccttttgggatcccagcaagcaggaccaacactgatgctgtctgcagcaggtgggtakcttccccctgcctcttagggcccttcttctccttcagcatggaggagaataggtttggtgcaaaagcagaggaactcagcactaaccgtacactctctcctctccctgcaggctgtgtgaaggcgtgggctcagtcaatatctgtaagttgggtgtgtgtgggcatggctttctggggtttcagcaatcttagtattagattgcatctaactgatgaccaagcctctgtctatggagtggtagacaagggactcctgagctgatgtctctgggatccagacaaactgatgacctcaaatatttgaccatacatggatccatctggaacacccatgaagtctaagttaatgaatggkgcaaattctgaacccctatttggttctgcaaaaatagcttaagccttttagttacacacagaatactactcaagtggtagcatgttctagtaagaaaaaaagctaggtttatattctgatcaygtgggtctctgcaggyaacttgtaaatctctatctaataatccaatgtacacacagcccctgggccaggtgtctgattcccatccctccattcccctcacctctctagcaaccatatttctagatgactcctctagtgtgatctatcagtttttgctcaaagattgtatgaacatgtctcaacatcagcctggtccaagtagagtttggtgtgcaatttgctaaccacactcctgaagaagcagatggcagtgggttcaggtttgcctgtagtttaaaaagactcatgttgctggtccctcagagaaggaagataattaatcattggttctaaaggattctgggtcataacatgtctgagatggaagagaattctgacctgtgtctctgtccacatgtgtgagccattcccagggtggtgtggtctgcggggacctggactccactgcctcctgtggctcagggggtgtggccatcagcagtggtgcactgtgttgcccctctgcagtgggggcctgctccagtgcccaatctgtgcggtttgcatagagggggtgggactctggacggacctgttctgatgggggcagtgtgggttggggagtggaaatcttttctcttgcatgaccaaatgtcagtttagtaatttccccttacagagaacccagaactaactctcctgtttccttcttattggagttaacaatttactttctctgtgtaaaccctgggtttgacattattttcacttccattgcttctccccttccctgtggttcaggaatgaaatagaaaggcttttttttgaatgaatttctcggtcattgtcttccccaattaacttcaggccagcagatgttaaattaagtcctgactgtgtgccagatcctcttggaacggagccagctagagggtgtggagtatgtgggaacatctctgygctttgccctcggatgacaggggctccagatgctgcctcagcatggaagggtggtgtgggtgtggagctgggctcctcacttgctctgagagattgtatattcccagagtcccccaactattcatatgtccagattgaaagactgacggaggctaatcagctgggtttatactgtttgttgcctggaagttcattgtatttgcatgattcctgtatggttccttctttcttttggtgtgcttgattaaatatcaatggcgaaaggctttttcttagtaaccaagttaatgcctgcctccttcattgtcttcccaacccacccaaagccctgactgtcttggtgcatctcacaatgtggtccaccgaccaccacctgcatcagaatccctgtggggtagttgctaaatgtgcagatcctgggctccatctggaactctcaatcaaaagttctagggatgagcccaggaatctgtattttaagaagcttccaggtgattcctagaagaactaaagcttgagaaccacaggttgatgtgggtagagggaagaggagggtcggataattctggccatggaagtgactgtccctctgattctcactggatcggtctagcccctttgcatttctcctttgtctgcggctaaaaggtcagagccatggtctgggccacacacacaccagggcaaggtgggggcaaaggtacaaaaggggtgaggaagggagcctgtatttgttaaacacctgytaggtgtctggcacattatatatgtatttcattaatttctcacagcaaccagaatattatcctcattttacgtataaataaattaaggctcaaagaagtagctttactaagttacccagctagtccagaattcaaactcatgtctagggaatgctgctgttcataaatgtttccacagcatttccctaattgctcctcaggctaaacattccggctcatcagatgcttccggaggagttctgcctgatgctccttcaccagctgtctgacactttggagatgagatggaaggtgacacatgggacctcctagaagcatttgtagaaacatctccccgtaggttctgttctccaagaatctcggacagatcgtaccacggggcggttaatacaagccttttatatgggaacccaagatcaaagctcagacacgtggttggaaggcatttgccctgataacctggtcagaggcaattgattggtgaactgtatgtctggcctactcttgaactgacagttccctagaagtcctacctagggctgtctcacctgtatgtgatgaatggagacaggggtttctgaaggtcaactttctttcacttgttgtacaggaagaactatttctcccaccttattttatttggaactttttttttttttaagcctgactgggtaggaaacattttgccacaagaatgcatatctgatctcatgacatagaaaagtctttaaaaggttttttttttcttttcttttccatggtgctcacgcacattgccaaamcttctggtaccagctccggacctgccaaggcaatggcttggcaccccggcctaggggtggagtctgggggagcagggcctggccttttgactacctgcgggttcgctccccacatcccattcactgcagacgggcgacccccgagggtctttataaaacctctgtgccaggacgcactaggcacctagacttcggagaggagggcgccgaccccggccacggtgctatgggcatgtcacggggcagccctgagcagccaataacccccaaacaccctgcccactaccccaaaacggcgggcaggtggcgcccagctcgccctcccgtccctcccggcgcccagcccctaggcccctcaccactggggttagaggctaagggcgggacgcggggcgtctcgggcaggggtgaaggagggcagccggggcccaggcgtggagggcgggcgcgtttgagagaggcgcaggcggcgggatcccggcggacggcagaagactcaggaaccagtccagaggcgccgaggcgcgaaccttgcgtgagccaaggacccaaggcccctgtggatctgatcccgcgggctccagcagggcccgcgccgtgcatctggagatgggcccaggatacccggtggctggacgtgacggtgggcaggcaggcagggcagggcacggggcgacccgtgagcaaagcgagggtgggggtaggaggggtgtggcccctgactctcgtgggtggggagatgggggacaacggtggcctcaacgggagacggggccaaagtggggacctgcagggaggacctgcaggccccttgttacactgtaaactgtccccacccaggtggcctgcggaccaccgaggctgaggaagtcctgctggcctggacggtgactcgccttcccatcccgagtctctcgcatccagagggccagcactgcacgggcgacataacagagaagagcctttgaatggttctcctcggccacgcagttcttctgatgtcttcagactctgtttcagtgaccacaatggccaggcagtgacttgacctgggcggacagaggtctatcttagtagggtggtgcttcccttgtctctgtctcccggaccaaagggtcttgcaggggcctgcccatcacagtccggatcccaccaagtttgagcagcagtaaagccaggttaaaagggtcaccagagtgactctgaggaggaaacggtgtctcagggggcattggctgccctggggcatgggactgtggactggggaagggtctgtgtttccttttgatggtggtggagggtggctatttgtctatgaatgccttgggtattttcttcatttttaatgcgtaagcttatcatgctgtccccgcctcaccccactccctggctgctcccctgccaacatgggggagccctcggtttttgaacaaagcggaaatgagcagggatttccaggcatgcacaggttgggggttgggggttgggggaggcaggaaggtggcctgaggctctgtgaaataagcctctcccattgcttgttctgcctggcatgtccctacacccaaggagtgtggcgcttagtgcccatgtcgttgttgctctgatcctcaatgagcaaaacacttagtacagtcacttcctaatgctcatgttcccagagagagacaggagtgtgaataacccagacaaggggacattaagtcccacatggtcatgtccgtgtctacacagaacatacttggtaattttcttgataatatggttaatttgtgttcctcactatgcttggctaatgtgagtagtaacacaaaattctattttctgagatcccaaagattgaagcagggaacagttagagacacgggctgggggaaggaactctcttgggcataggtgtttgtgaggatgggttgaagcagagtgggttgagaattggtggtggagtgttagtggtttcaggagaaaggaaaagatgacaaatcccaagcgtacctgtttctttgaacaggttattatccatacttctaatcctctggaagctttgtgtgtttgtggggaaggatatcactaacatttacataagaattgaatacagacagcaggtctgattttctctgatgctggtgttagcttggtttgtgatgtttctaagcaggaaggagcccagggcagagatctgggatcactcccatggcccactttattgtttgggcctcttgaacttctggcttttcctcgatctctcaatttcaggtcacttgacttcttcagaattttttctttctaataaaatgttaatccttagttacccttggactgtaccctttgcattccgaggggaatagttctttgatcaggagagagctgcaggagccccagcatcctttgagccagaagagcttgctgtggtgggtttttgctgttggctgcaaggagggctggggcagaggcttacctccccataagcaaaaggcacctctggccagctgaatctgttgaatggtatttgcacacaaagcacggaaatgtattaaaaaattcattcctatctcccaggttctggctgtttgacttttcaatccatggtgccgttattttttgggtatcagatttggcatttttgttttgctcagcccagatccatggtaacatgaagctgttttccccaagcatagactctctgtagcatctcagaaccataggaggcagcagacctggtaaggactctacccactcatctcatagaccccagactgacatgcaaagcatgaaagccacttcctgcccaaggactcaccgagacctggcagtcttggcagaattggggctcaaatttccatttcctgatgtttcagcccctgggatttaacgtttcctgtgggtgaatgatgtcccctaaattgaaagttggcctattgtgattgtcaccatgccctcagggcccaaacagctgggaaaaaggaggcagcaggcaagagacctggaggaggcccgccaggtgtcagccagcaaacctcaaacagagcagcagcctaagcactcagaagcagccagcagcctccagtggggctacagccctttgggcctaaagtgaggatgcacaaggccctatcttctcctctcagagaaagaggctgcaggatggggcagcagggggctggcagacacctgcttgatgacggtgacagctaatggggagatggagctgagggcaagaggactggatgtctctacctcctgctgcaccagctgcctgcattcatccagcacatcccaggcctggcatatcttggagccccatcctgggactcagtgggaggtcagagccaggaggagatacttcctgtccttatggaatttccagcttgatccagacacacccgttgacatccctggcccagatccgcagagacaaaaccagagattctcagggttccagacactatatgatgggggcgggggagggctggggggtgtaggggtgagggtggtagctttggggagcagaggagggccctgagcaaaggcaaatgggaggagggatgtgggatggcctatgtgtccacaaggggtatgtaggagagagtgtctctgggctgcctcagagggtagacttgtctccttggggtggagtccatgactgggaggatgagcaccgcatggaggggttggacagggctgaggagtagctggggaaggaggtgacagaggaagcctgcatttggcataagaagcacacacatgtgccaggaagtgacttgagccaggcaggagagggtgagagcagtgagtttgggatggagttttggctgctgggagtacgcagggtgggtcagggagaaagaggtcattagtggggagctgggctgtagtccaggcctgaggggactgagggcgactgagtggaatcagactgtggaagtggacaggaagcagcagagtttctggggggtgactggggaaacactgcatggggctggactgggats

SEQ ID NO: 6901 - DNA, 14010 bp, Homo sapiens
agactttggaggcaaactgactgaatttgaatcccgactcagccacttacttgctgtgtgaccttgggaaattattcagccattctgtgcctcagtttcttcatctatcaaatggaaataataatagtatctacctcatagaataatgctgggtatgtagtaactactcaatatgtgctgtcattattattattatgcttagttgtaatacatgtccttcacacattttatccggtttcctatcttcatgctacaaagcttagacctctaacaccttaaattaattgttcagttacaaaagcagattcaaaattcttctgtgagaaatgttttggatttatccataggcataattgctactcacctctgcaaaaggggagagccttccatgtgggtgcaaaactagctgatcagtaagcacttctgagatctaaagcctatagttttctcattagccaagagttacttcatttattcaatttttttttttttttttttgagatggggtctcactctgtcactcaggctggagtacagttgtgtgatcatagctcacttcagcctctacctcctgggctcaggtgatcctcccacttcagcctctcaagtagctgggaccacaggtatacactaccacacccagctaatttttgtattttttttttgtagggactgggtctcaccatgttgcctaggctggtctcaaactcctgggctcaagagatctgcctgccttggcctcccaaagtgctattcaacatttattatcaggtactgtgctgggcactggagatagcactatgacctgacaagcacagttacattcttcacagagccaaatgtcttgtggcagatagacagagcctgatgggcggttattataagtgattcacaagaggatgcctgcaaatggacgaggaactcctgactagcagcacaatgaagacgagggaaggggatgagataatgtctaacgtggacgttaagaacatggagaactagatgggggtgggaaatgaccgagcaagagtgttccagctgagaatttgcatgtgctgtggccatgagataagacagcttagggagcatgtagagaaatttattttattgtatttttttgagatggagtcttgcactgtcgcccaggctagatgcagtggcgcagtctcagctcactacaacctctgcctcccaagttcaagcgattctccttgcctcagcgtcccgagaagctgggattacaggcgctcgccaccactcccagctaatttttttgtatttttatgagagactaaaaatgttggccaggctggtctcaaactcctgacctcgtgatctgcccgcctccgcctccaaaagtgctgggattacaggcgtgagccaccgtgcctggcctaattttgtattttcactagagacagggttttgccatgttggccaggctggccttgaacacttgacctcaagtgatccacccaccttggcctcccaaagtgctgggattacaggcgtgagccaccacacctggccaagcacatagagaaattagtcattccttctagctaaagggtagagtttgagattgtgtgattgaattgtgaaagaatttctaagatttgttaagtaatttaagtggaagacaatggggtacaggttgagcattcttagtcctaaaatctgaaatgctccaaaattcaaaagtttgagtatcaacacgatactgaaagtgaaaaattccacatatcagtacttagcacaaggtttgtttcatgtacaaaattatttaaaatattatgtaaagttacctttaggttatgtgtatacggtacatatgaaacattaataaacttcgtgtttagacttgggacctgtccccaggacatctcattatgtatatgcaaatattgcaaatcccaaaaaacccaaaatccaaacacttgtggccccaagcattttggataagggatactcaacttgtaccatcaaaagatttaaacaggagagtagcatgaaagagcattcagttaatgtcctagagaatgaacttgggaggggcatggatgaaaatagggagatggctggagatagcacaatgactagtagccagctgcaaagatactaagcccatagaaccatagaaccaacaggactttgtgatggactaggtgtggggagggaaggcaggaatagacttccaggtttctggctgagatgctggtagaaatgataatacctgatgagaagcatatttgtagagaacaaaaggggaaataatttgctttgagttgttgacatgttgagtttgaggtgcctttgagaattaggttgaatagagtagcctagagcagcagtacttaaaagaagtaagagtgtgagtcattaaattttctattacctatatcaaaaacagtaaaaagaaacaggtgaaattagtgttaacaatgacattttgtactaaagctttgaaatcatctagtcacattttactcatctagtcacatttttagtgtccagtattttactcatctagtcacgtttttagtgtccagtatctaccgcaagacagagcagtgccagacctaaggaattcaatttaggctgctgatagagaattagaaatttgtaggcatataaatggtaactaaaatcatgggagtgagagcagtcagcaatgtatggggccaaagaaagaaactactcatatttaagagataggaagggaaagagcagctcatagagagcaactcagaagagaatgaaaaagactggcgtttgtagcactcatcagagaattctatcaagataacccataatccaacacttgccatatttggatgaaatttgttaattgagagcaaaaaatagtaagaaatatcattttccatttctcttaagttttctaggctctttctgaagtttgttcagcagaaagcaacatagcaaagtttttgtagtttcgtgaagaatctgctttgatgaattatgatttaatgagatagctttaattttatatattatcagtatattaaaatgttcctcatatgtatctcttatcttttgcaaaactattgtctatatatataacatgtttgttattacagatcaatctcagcgaggtagcctcttcactctctttttgaacaatcctctaatggccttcctatttgtctctggattgtcaagcatgcgcagaggcctatgggaaaagtgtcaagaatatcttcgaaaaatcaaccgtgatattgcccagctactgactcattcacgttcaataggtaccctcctaatctaactgcacgtttaacagaatgtactataatggcttaaaatggttacttattttaaattgtttgaatttttaaaggtatgtgtcccaggcaggaaagttgagaacgctttcctgaagtttccttcccctttgaaacataatttccatttaagcatctttttactgtcacttttctcctctttgcagatcaggcatttctccagttttttggagatgaatttcttcgcttgctcctcacaagatttatcttttgttcagccaccatgaggatgcacaagatttttcgggtaggcaaagaacattattaaagacgaattttatcattttaggtatttaagaaccatgtattatattttacctgtataaaataaggttataataaaataatattattttggataaattcaaaataatatttacaaatgtaccgtcacactggtctgctaagtaaaaaaatacatttgaatacgtaaagtataaagattaacaatattaaggcacatttgagtacctatcgtttgtttaaaagtagaacattttctggctggccgtggtggctcccgcctgtaatctcagcactttgggaggtcgaagctggtggaacacttgaggtcatgagttggagaccagcctggccaacatgctgaaactccttctctactaaaaataaaaaaattagccaggtatggtggcacgcgcctgtaatcccagctactctggaggctgaggcaggagaattgcttgaacccaggaggcggaggttgtggtgagcagagattgcatcactgcactccagcctggacgacaagaacgaaactccaactcaaaaaattaaaaaaaataaaagtagaacattttcaatacatccctgatcctatctccctctcaaatgaaacttacatcctgaattttatttatttatttatttatttagagatggagtttcactcatgttgcccaggctggagtgcaatgactcgatctcagctcactgcaacctctgcctcctgggttcaagtgattctcctggctcagactcccaagtagtagctgggattataggcgcccaccaccacacctggctaattttttgtatttttagtagatacagggtttcaccatattggccaggctggtctcgatctcctgacctcaggtgatccacccgccttggccttccaaagcgctgggattattggcatgagccactgcacccggccctgaaattttttttttaatcattcatttttctttgtagttttgcagcatgtatttctattcctacacaacatatttatgaatccatattgtatgtattctgcagcttccttttttccagttattcctgagattgagccatgttgattgactatagctttcactcattcattttgtttgactgtgcaacactaggcagtgtttgactatatattgcaaatcacttattcttctgataatggacatttgggttgcttccaagtttttattattatataaatgatactggccaggcgcagtggctcacacctgtaatcccagcactttgggaggcagaggcaggcagatcacaagctcaggagttcaagaccaggctggccaacatgatgaaatcctgtctctactaaaaatacaaaaattagccagacatggtggcatgcacctgtaatcccagctactcgggaggctgaggaaggagaattgcctgaacccaggaggcggaggttgcagtgagcagagatcatgccgctgcactccagcctgtgcaacagagcaatactcagtcttggaaaaaaaaaaatgatgttactgtgaaattcttgtatcagtttcctggtacacatatgtaagattttctctgaggaatatacctaatagtagaattgcaagatcagaggatataagcatatttaattttactaggtaatgccagactgtgttccaaagcggttgtatcagtttacacttataccagcaggatataagagttgctatttctgtaatccttcctttccaacacttgttgcaatcatactttatagcttttgtgaatctgctgaatgtaaagtggtaggacattgtggttttaatttttatttcgaggattactgttaaggttgagcaacttctcatatgtgttctgtttttctctttgtaaagaatgtgttcaagtcttttgcttgacttgatagtccagttttctagctgttgcttttttgtgtatggatgtacctatacaacacttcattgaggttttaaatattttagccattatatttttcacttctgtaaggaaaatttttttttcaaatatgcctgaacagttaaaaaaatattttgcagcttttggtttcagaatattatttctttctgttttattatgataattttgaaatgtaaaagaactgtgcaatgggccaggcgcagtggctcacacctgtaatctcagcactttgggaggccgagacaggagcatcacttcaggctaggaatttgagaccagcctgggtaacatagtgagacctcatttctacaaagaaatttttaaaattagccaggagtagtgatgtgtgcctatagtcccagctcttcaggaggctaaggtgggagaattgcttgagcccaggggtttgaggctgcagtgagctctgattgtaccactgcatgggccaactgtgcagttccacttaagacacagcctttttttttttttttccaaaaaataaattggaaaaattttggagatttcctacagtttggaaaacagatgaactacatagcctaggaatattgaaaacattgctcacctgggccctgcggccagcagaattggccccgctctatggctgctggggcctgcgcactggaatcgccgtggcctgcgcaccccaccatgccagtttgaacctccatggcctcaaccagattcggaatgtcaaaaagcagagtgtctatttgatgaatttgaggaaatcgggaactttgggccacccaggctctgtagatgagaccacctatgaaagactagcggaggaatcactggactctttagcagagttttttgaagaccttgcagacaagccatacacgtttgagkactatgatgtttcctttgggagtgktgtcttaactggtaaactgggtagagatctagcaacctacgtgatcaacaagcagacaccaaacaagcaaatctggttatcttctccatccagtggactcaagcgttatgactggactgagaaaaactgggtgtactcccacgattgcgtgtccctccatgatgtgctcgctgcagagctcactaaagccttaaaaaccaaactggrcttgtcttccttggcctattctggagaagacgcttgatgcccagcccggttttaaggatattaaaagctgtcaggccaagaccccagcttcattatgcagctgaggtctgtttttttgtttttcgttttttgtttttcattcctgcttttgaggaacagctctgtggaaagaacgtgttgcctcctaccttgcccacaagttttgatttttaatttctacagaagatttttttggattaattgtctgatttcctccctcatatgatatcctttatcttttataatgtcttatccctatacctgaatataacaacctttaaaaaagcaaaagaataagaaggaaaaattccagcaggagaaatgaattgtcttcactcttcattctttgaaggacttactgcaagaagtacatgaagagcaactggttaacctgctcactgttctgtctcaaaatgagacacattaacgggtaggctacaatgttcctggrcttctttcaaagtggaagcacttctgagctctttagcattgaagtgtcaaaagcaattcacatgggaagacaatttcttatatgtgctttgtgactgccagggtgtggcctgcactgggttgtcctgggagacctagtgctgtttcttccacatattcacgtgtgtgtgtgtgtgtgtatttttttattattttttcattttaagggttagtatggaatcagctgctacaagaatgcaaaaaacttccaatgacaagaaaggaggaaaaaaaagccattttcatgagctgagtgatgtagcataataaacaaaatcatggagctgaggaggtgctttgtaaacgtgaaggggcataaaaaggaaagagatacttgtgtcaataaagagagcctggtcctagacgtagttcagccacaaagtagttgtgcctttgtggacaagtttcccaaactccctgagcctctgctttcccatctgttaaatgaggggatagaatatggttgatttccagcattcagtggtcctgtcaagcagcctaacaggctagctctaattcccattgggtagatgaggggatgacaaagaacaatttgtgagctatataggaaacattgttattggtgttgccctatcaggatttcagttgaattcatgttaaaattacagccgtcctttattgtacacttattgggttaagcctattataccatattacctcattttaatttttactgacctgcactttatacatgaagcaacaaggctccaggacattaaaactcacacaaagttatgctcatgttatattattttcttacttaaagaaggatttattagtgacaagtttgtattaatatgtagcaaaggcttttccaatgggtgaataaaaacacattccattatagtaaaaaaaaaaaaaaaaagtcaagctgggagaagtggcatatacctatagtcccagctactcaggaggctgaggcaggaggactgcttgaagccaggaattggagatcagcctgggcaacataggaagatcctatctcttagaaaaaaaaaactcttaataatgaaacagtataaacagaagctaagtaaaatattttctttctcctgaaataaaattattttttgagtctgatggaagtgtttaagtgcagtaggtcagtgccagtgagaaaaaaaataaaatcatacaaaaaaagaaatattgaataaattaagaaaaaggtatatcatgaatacataaaatatatgtagacactagtctattttatcatttactactataagatatatacaaatctattatgaatgattaaaatttatgcacacacttacagaccatatatggtaccattcacagtccagagaagtgtaaacaaaagtaatgatgcaatattaaatcataactgtccttgtgatagtttgctgagaatgatggtttccagcttcatccatgtccctacaaaggacatgaactcatcattttttatggaaggacaaaaaaccaaacaccgcatgttctcactcataggtgggaattgaacaatgagagcacatggacacaggaaggggaacatcacacaccggggcctgttgtggggtcgggggaggggggagggatagcattaggagatatacctaatgtaaatgacaagttaatgggtgcagcacaccaacatggcacatgtatacatatgtaacaaacctgcacgtgtgcacatgtaccctagaacttaaagtataattttaaaaaatcataactgcataaaatcactgtagtgcctactgtactactgtaataatttggtagccacatcctgttgctctggcagtaagctcaagtgttgcaagtactgcttagaatgcctgtcatttccgtgagcagtttgtctctccagtaaattgtgtattgtaataaaaaatgatctctagtggttctcacatattttttattgtgtttagtgcagtactgtagtaaaccttgcataacaccatgggatccatatgaagtgatgcttcaagtgctcccaagaagcaatgaaaagtcatgacattacaagaaaaagttgaattgcttgatatgtaccatagatcaaggtttgccattgtggttgcctgccatttcaagataaattaatccagtaaggagtgttgtaaaaaaagaaaagaaaatttgtgaagccatcactgtagctacgttagcaggcatgaaaaccttacactttttgtgaaatacctttttatctcataatgaaaatgtagcgtttatgtaggtgcaaggttgctataagacatacttacaggccgggcacagtagctcacgcctgtaatcccagcactttgggaggccacagagggtggatcaccttaggtcaagatttcaagaccagcctgaccaatatggtgaaaccctcgtctctactaaaaatataaaaattagctgggcgtcgtggcgtgagcctgtagtctcagctactcgggaggctgagacaggagaactgcttgaaaccagaaggcggaggttgcagtgagctgagatcacaccactggactccagcctgggcgacagagcaagactccattcccccccgacatacacacaaaaaaaagacatatattatgatttgagaaaaagcaaactcattatataacaaagcaaaaggaaagtgaaggatctacagctagagaattaaattctggcaagaaagggtttgataattttcgaaagagctttggctttaaaaatgttaagataacacgagaagcagcttctgccaaccaagaggcagcagacaagttcccagaaagtaccttttctggaaaaaaaaaaaaaacctgccacaaaagacatttattagtaaggaagagaagtgaacaccaggatttaaacaggaagggatagacaactctgttattttgtgcaaatgcacttgggtttatgatcaggagagtctttatctataaagctgctaatgcaccttgacagaaaagataaacaccagctgccagtacaacaagaaggtctggacaacaggaactttcttccagattagtttcgttgatgctgtgtccttgaaatcaggaagtaccttgccagtaagggactaccttttaaagtttttttgatatttggcaatgccgtggctgtccagaaccccattaattctatactgaaggtatcaaagtggcctacttgccccagaacacaatgtcagcctctagatggggggtcctaaggacctttaaggttcattacacagagtatgtattatcaaaactatggaagagaacccccaatggagagaacatcatgaaagcctgaaaggattccaccattggaaatgccatcattattacagaaaaaggcttgaaagccatcaagcctggaatcattcctgctggagaaaactgtgtctagatgttgtgcatgacttcagaggatttgtgacaatcaaggaaatcatgaaagagattgtggatgtggcaaaaagggtggggagtgaagggtttcgagatacagatcttggagaaattcaagagctaatagacaccacaccagaagaattaacagaagatgacgtggggtggacatgaatgtttctgaaccagtgccaggaagcagacatagaagaagcagtggcagaaaacaaatggacattagacaacccagcagaagggtttagattattcaggattgggcttttgacttctatgagatggatgcttctatgataatggacactgaaatgaaagcaaatagtggaaggattggtgccatatagaaacattttagagaaatgaaaaagcagaaatgtcagacacaaattatgacatatttgcataaaattatacccagttgcctgtctctcctgcctccccttccatctccttcacctctcctctctctgccacccctgagacagcaagaccaacccctcctcctcctccacagcctactcaatgtgaaggcaatgaggatgaagacctttatgataatccacttccatttaatgaatagtaaatatatttctcttccttatgattttctttttcctttttttttttttttttttttttttgagacagattctcactctgttgcccaggttggaaggctggagcacagtggcgcgatctcagctcactgcaacctgcacctccggggttcaagagattattctgcctcagcatcctgagtagctgggattacaggcatgttccaccatgcccgcctaatttttgtatttttagtagaggtgggatttcgccatgttggccaacctggtctcgaactcctggcctcaagtgatcctcctgcctcagcctcctaaagtgctaggattacaggtgtgagccaccgtgctcagccctggccaattttcttagtaacattttcttttctcagcccggcgctgtggctcacgcctgtaatcccagcactttgggaggccaaggtgggcagatcatgaggtcaggagttcaagaccagcctggccaacatggtgaaaccccgtctctactaaaaatacaaaaattagccgagcatggtgtgagcacctgtaatcccagctgctcgggaggctgagacaggagaatcgcttgaacctgggaggcagaggttgcagtgagccaagattgcaccattgtactccagcctgggtaacaaaagcaaaactccgtctcgggggggaaaaaattcttttctctagctaactgtattgtaagaatacagtatataggctgggtgtggtggctcacgcctgtaatcccagcactatgggaggctgaggagggtacatcacctgaggtcaggagttcaagaccagcctggccaacatggtgaaaccccatctctactaaaaatacaaaaattagccatctgtggtggcatgcacctgtaatcccggctactcaggaggctgagacacgagaatcacttgaacctgggaggtggaggttgcagtgagccaagatcgcgcgactgcactccagcctgggtgacagagcaagactgtctcaaaaaaaaaaaagaaaaagaaagaaaaagaaaaaacaatatataatacatataatatacaaagtatttgttaattgactgtttatgttatctgtaaggtttctagttactggtaggctataagttgaattgcttgatatgtaccatagatcaaggtttgccattgtggttgcgtgccattttaagataattaatccagtaaggagtgttgtaaaaaaagaaaagaaaatctgtgaagccatcactgtagctacgttagcagccatgaaaaccttacactttttgtgaaatacctttttatctcataatgaaaatgtagcatttatgtaggtgcaaggttgctataagacatacttacagaccgggcacagtagctcacacctgtaatcccagcactttggcaggccacagcgggttggtcaccttaggtcaagaattcaagaccagcctgaccaatatggtgaaactctcgtctctactaaaaatacaaaaattagctgggcgtcgtggcgtgagcctgtagtctcagctactcgggaggctgagacaggagaactgcttgaacccagaaggtggaggttgcagtgagctgagatcacaccactgcactccagcctgggcgacagagcaagactccatccccccccgcaaaaaaaaaaaaaaaaaaaagacatatattatgatttgagaaaaagcaaactcattatataacaaagcaaaaggaaagtgaaggatctacagctagagaattaaattctggcaaaaaaagggtttgataattttcaaaagagctttggctttaaaaatgttaacacgagaagcagcttctgccaaccaagaggcagcagacaagttcccaggtgccactgaggggaaaggatacctgcctgaacaggtttttagtgcagaagaaagtaccttttctggaaaaaaaaaaaaaaaaactgccacaaaggacatttattagttaaatttcaggtagttaaaagttatacatggatttttcagggagttgaaagttatacatggatttttaactgtgttagggagggggctcagcatccctaacccctgcattgttcaggggtcagctatatttgagttctgacatatttgtccatttatggattcgtcttaccattcatcagtagatcttttttttttttttttgagatggagtcttgctctgttgcctaggctggagtacaatggcgtgatcactgctcactgcaacttctgcctcctgggttcaagcaattctcctgcctcagcctcccgagtagctgggattacaggtgtgtgccaccacgcccagctaatttttgtatttttagtagagatggagtttcaccatattggccaggctggtctcgaactcctggcctcaggtgatccaaccgcctcagcctcccaaagttctaggattacagggatgagccaccacgcctgacaccatcttattttttaatgcattttgaagtaaattgcggacgtcacccacaaacacttcatcatgcatatatgtaatatgtttactttttttttttttaatgagatgagatcttcctatgttgcctaggctgatcttgaacttctggattcaagctatcctcctgcctcagcatcaaacatagctggaactataggcacattgccactgcccaactactaatttttttttttttttttttaatttgagacagagtctctgtctgtcatgcagtttggagtacagggatgcaattgtagcttactgcagcctcagtctcctgggctcaagcagtcctcctgcttctagcctcctgaatagctgggaccacctgagtacggtgcaccaacatgcccagctaatttttaaatttttttgtagagatggggttttgc

SEQ ID NO: 6902 - DNA, 83903 bp, Homo sapiens
acaagaccgtaaaaaaaagtaaggaagatggtggccaggcatggtggctcacacctgtaatccttgcactttgggaggccgaggcaggtggattacttgaggttaggagtttgagaccagcctggccaacatgatgaaaccctgtttctactaaaaaaaaaaaaaaatagaaaaattagctgtccatgatggcatgggcctgtaatcctagctgtttcggaggctgaggcagaagagtcatttgaacccaggaggctaaagttgcagtgagccaagatcgcgccactgcacaccagcctgggcaacagagcaagacttcatctcccaaaaaaaaaaaaaaaaagccatatgttcgttttcattcaacatttactgaatattataaatagggtaccatgttagggcttaagatagaaatatgggcagggagttttggggaagtccatagtctgttggagcagaaagacaaacattcattcatttattcatttttgagacagagtcttgctctgtcacccaggctggagtgcagtggtgccatctttggctcaatgtaacctcttcctccagggttcaagtgattctcctacctcagcctcccaagtggctgcgactacaggcacaccaccatgctgggctgatttttaaagatttttgtagagacaaggtctcactatactgtacaggctggtttcgaattcttgggcccaagcaatcctcccacctcagcctcccaaagtgctgggattacaggcatgaaccaccatgcctagcccagaaagacatttaaaacaatcacagtaggctgaggctagaggatcgctagaggtcaggagttggagaccaccttgggcaacaaaacaaggccctgttcgctacaaaaaaattagccaggtgtggtggcacgggcctgtagtctcagctactctggaggctgaggccagaggatcacttgagcccagaagttcttcgaggtcacactgcactccagctggggcaacagagtggaccctgcttctaaaataaataaataaaacaatcacagtgtaacaagttctgtgttaccacagtgatataaacagagattgggttggcatgagaaagaagtaaaattcctgggtttatggaccatgggccactaactttaagtgattaattcttttaatggtgcaaattatccaaaattaaaaataaccagggttggcatggtggttcacacctgtaatctcagcactttgggaggccaaggcaggcagatcacctgaggtcggaagtttggagacttgcctgaccaacatggagaaaccccatctctactaaaaatacaaaattagccgtgtgtggtgatgcatgcttgtgatcccagctactcgggaggctgaggcaggagaatcacttgaacctggggggcagaggttacggtcagcagagatcgcaccattgcactccagcctgggcaacagagcaaaactccatctcaaaagcaaacaaacaaacaacaacaacaacacacccgtaatacctggaaatactattaattatgcacttggactcctgggatgaagaaagctaacagagagttaattttcctaacggtattttcgctggtatcaaggaaaaaatcagtgtaagttcatttccctttataggagggtctaagattttccaacacgttcaagatttgctcttaaaaatggacctactagcacctcctaactacccacactttccttagcaaggcaccagtttgtgtgggggcactgagaagtcaaaggagtattcatgtgatcattgacacagaatgcacaaacagatctctgtctgatggagttgaagcctcttgagaatctggactagcagccaaagggaagtgaggggaagcgggtagggtgggaggatgagaaggagcaggagagagaaaaatcccaatcaggactaagttccaatcaagctctcaaaatgccctttctgctgataatgcctcagatatttcactaaactgtattttactgttctttaatactttgacttaaggaatagaggtattcttagggaatcacaaacatggaaaaacacaatacaataaagactgaaatgaaggaaaatccaaataactaaaaggaaaaaaattatatccatcacctgcaaattcaacgtgttcaaaaatcacattctctgaaaatcagctctcgtcctaattttggacaaagtatttcttttcctcatcctctggttcaaaaccttggggtcttcttagagtcctctatctccttcaagccctataataactagttagaactcaaattccacagattcttccttcaacatttctcattgcattcactcaagcagtttttattgtgtacctactgatgccaatttcaggagattctggtggtacaactgggagggtaggatgtggagatgtatacagcaacagctactaaactagtccactaaatacatgagtggttgagaaataagtgcgtactacaaagattctgacgtatgagatgctgtctggctgggttaatcaggaaacccttggggaggggtagggaactcaagctgggccttgactctcaggtctaacttcgattacacagagctagtgaagggaattgggaaggaaagcactcagggaactacgaataaaggtggctgcctggaattaaacgtccagggagcagtgagaaaaaaaggctggggccaggtagtggcaggctttgaaggcttgcccaagaggcctttaacccttaggctgccaggttatttccctcccatcgcctgcagcttctttacagctgacactttcaccaggaacccaggtacaaaacaaaggtggcagcagctgcttttgtgatcaaagggtgctccttctgcatttaaatttgcaggctgctactctgagtgactgaacaggaagctagctggtccctttagcgctaacaaagcttgatttaggctgaaagattagaaagcacatcttattctataaacgcttcaacactctgttatccttcaacaaccctaactagggctgtgatctaagattgacaatattaacttaatccttgtcaaatttgttttcattttatggctccctggctcaaggatctacaacaactcttagtacagataacaggtcattcaaatttctctgcctggaatccaaagttatacacaatccaaccctaccaaaccttttcaacttttatctgttactattcctttgtaccaactttcttttctttttgtttttttgagacggagtctcgctctgttgcccaggctggagtgcaggggcgcgatctccgctcacggcagcctctgcctcccaggctcaagcgattctccagcctcagcctcctgagtagctgggattacaggcatgcaccaccatgcctggctaatttttgtattttcagtagagcggggtttcaccatgttggccaggctggtctcaaactcctgggctcaagcaatccgcctaccttgttctctcaaagtgttggcattacaggcgtgagccactgtgcccaccaccaactttcttttcttaggagggctaaattacaacagggctagtgttacagtcttaaatcagttgagttgaattcaaattaagcaacagtttagaccattttttttcagaaagaaacaaaaatataaattttgcaaaaacgtttgtaagaatttagcagtcccagtggctcatgcctgtaatcccagcacttcgggaagctgagatgggaggatggcttcagtcctggagttagagaccaacctaggcaacatggtgaaacctcgtcactacaatacaaaaattagccgagcgcagtggcacactccctgttgtcccagctacttcgggaggcttgaggcaggaggattgcttgagcataggtcgaggctacagtgagccatgatttcaccactgcactccagcctggcagacagagagggaccttgtctcaaaaaaaaaaaaaaaaaaagagaagaatttgcagtccttattcaagataagtccttattcaagataagacattcaagatgtcttttcaaaatatgttctgaatcaaaaaaaaatccaaaattattgttttcgtatcgcataaatgtgaaagactcatcacaaatgacactgatatagtaatgttctatatcttcgtagggggttggattgtataggtgtatgcattagtcaaaatcagtgaacgtacacttaaaggtttatatattccattttacatcaaaataaaccatcaacaaactctagtcaatgacatgcatgccaaagtatttaaaggaaagtgtacaggtatctgcaatttaaatggatggatagctatatgataaagcaagtaatattaaaatgttaatggtaggatagatcctaagtgatgtgctccttataaaattctttatacttggctggatattcgaaaattttcataataaaacatgagggaaaatgacattggtaagacactgtacttgtaaattgtaaacactgataacacactacatttcataaaattgtaagatgttaagtttggtggcagcaccaggtatttgctccttgatgcttccaaactacgctgcacacacctcttacagaatggttgcctctcccagcatactataagttcctggtgggcacagatctaacctaatttgtatttatattcctattgctttgcatcatgtttggggaataatatgtattcaacaatagtggcatgattgaattaaagtggaatactgctaacgaacaaagtattatatttctagcagattcactattcttttcttacatattctaaaggttaatacgctcaatatccaagagaaatgtgtccttacttctctccaagcatacgaaatttccaaagtttttttaaaaaaactactcattagataattttatattgttacttaaacccaagatctgaaggcctcctaacattcaataactttttagtagttttttttttttcctagaagagcaaagtctcagaactccacggaagcctggaaatcgttttattctaattttagataagctgtctgaactaagagatctctgaactggtcaaaagcaggaaagtgggggtctgggaagaagacaaaaacaaacgccacataaaacgtcatggagcaaactaatcaagaactttagcaagaaacggagagaaagtcttaaggaggacacccagaacatctccagctcctcctggcccgtctcctcaactcctcttaattccagccagtcagagcgcggggccatctgccactcccaggatgccacgcgacgggagcggacgctgcgaggatgcacctccacacgtcaacctcccacaaacagcatggcttcgtggcgtgagcacccggttcggacctgaacgcctgggtccgagtcccacctccccctcctgcctggtctgcagccctgcgcaagtcctcttgccctcgctgagcctcagtttcctcatctgtaaaatgtaatgattccctataattggctacagggagatgagaagtgtaaatggttttaaggaagacacaggcaactctctaacttgttacggctctgaacctcgcggtgctcactaaccagccttgagaccaatctctcaaagtcaccccgctcctcccttcccgcccggcgcctgtactgaggccgctccctcctgttggcccccatgcggaaggcgcgcggcgccgtctgccgtacctgcagccacctggtcagcggggccctcttgctgacccacgacgaagtcgtgcacgaggccccatagggcacccataggcgccgccgcctccacagccgcggcagcggccataacgcgaactagagaccgtgggaggggatatgggcggtggctcgagacgggctctccgcgcatgcgcctcccgagccaatctccggggaagcgcaagggggcggggcgccggggtcacgtgcctgccggcttctgcctaggcagttccagggaggggcggggcctgaaatggggcggtggcaccgagagggaaggcggctgctgggcacgcagccggaggcgattgagggcgaataattcccagcccggctccccgggagacgggctgcggggcgggcacctggctgggtggggagaggggcggtacgcaccacgggggaagccaatgagaaaatcaggcccagccctagggggcggtgctgtcggtcacatgcgcacctggggcgggtggtggcggcggcgcgggcaccgcgagccggcggaagggagaggggccggcctggggcggggttaggcaggtgagtgacaggctccagggggccggcccctgcctggtgccccgagcgagccgggagtagctgcggcggtgcccgccccctctctccgcccctccagcggagctggtctccggccgggcaccgtcgcgggcccccctggcccggccacctgggaccgtgctggggagtctgccacttccctctctcccctggcccgcaaagttttggcggagccatcgctggggctgagcgcgcccccggggggagatcggggagcgcccgatgccgggcggccggagccattgacccgggacgccgccgtccgctgagcagccgaccaccccgccgcctccggtgcatggggactggctgaggagccagcatgggcaactgcgtggggagacagcgccgggagaggccggcagccccgggacacccccgcaagcgagcaggtaacgatggggaagggagcagggcctcgggcatcccgccagttgtccccctcctcgcccgagtcctgggcttaccgatggactccccactggtgctggcgcttgggtttccccgatgggctgctccgcagccagagggggccgctccccagcgccgggcggccgggggagctgagttggggcaactgcgagcactgagccggctgcgcgaccaactctctccaactgggtagctcctggtgggggtgggggcaggaaatgtttgcagaccgcagcggggccgacggatcgggaggaggccgggggcgagggcgccgctggcctggcagctccggccggggtcggacgccggcccgtcggggcacggcgcgggcagccaggcgtccccagaactcggagcgagcgaggcgagaacagtcgctccttccaaagactgtgtcattatcgagctgcagatcgtgtctgcgggaatccgacttgcaaagcagcgcaggactctgggaaagaaatctttatttttcccgcaggggtttttagagcctctcggccgtctgggagtctataaaagatggggtgcggggtgagagtcacccttgggattgttgggatccttcccagctttgggagtgagatcgctcgctggtgatcctccagscccgcgcaacgctttctcactttcatggtacaccccgcctgccctggcatttcgccccgggaagaggtctgtcggtcatttttctgggtcttacactcacttccttctttgagggtgttgcaaggacccgctgggaataatatcgtagacttgagagctcaaacttgtctggattccagatggacccatctcctactctgtgtcaaagcccagatcctgagaggttgaacaccttgtccaaagtcacacagctagttaggagctcacctggggctagaactcagcctcctckcccaccccattgccacatatccccttatgtaagaggagccacaggcagagttgttaatgaagtggaaactctagttggagtttcctgtctcccttgacaccgaaggtgtgttgcttgggttgcggaaactgggaaggaagatgggggaaccaggggaagcagggaaggatgtctgcatggtggacaggatgacttgtggaggcagaaatgtgtttttatgggaaggatgcagtaaaacttattgaaattctcttgtctgaaggtaactctggccattcttctggctgaggagagatgactctcaaaaccaagggctggcttgctttcattcattcatttgttcaacaaatatgtgttcaggccccataattgattttgcagcattttttgctgttgacaactctctcctacgagacattcccccccttcctttcttggcatcagactgtcttggttttcctttctgaacacccctttccaccatcaccttctagcttgggggcacgctggtgcttaagtttgacattctgttttttctctcattacactctctcccagagaaatcttgttcagtcccacaactctttgtccattgggaatacccctatgcttaaacttcagctcttctctctygaaccccagaaccccatctctagatgcccactggacactgtgatatagatattcccagatttaacacctccaaaaccaggctctgcatcgctccctgtccaccagctttccttctttactcttatgttcttccagctgcctaactttaggctgtgaagagctctttctctcatgactttctctgcttccttgtcgcctgcctctcagccagtcattggggtctgctgggtcttccttccgcgggacttgcaaacctgccccttgccaccctactttgtacccttctcacctcaagtcaacccttgtctcaggctgaagtgaggtaccccccaaaggcaacttcatcttcagtcatcattcagtcctacacacagttgtccccacagaagacatttgttaaattaacttcttccagattttatagttctgtgttcagaatgtttctgtacttggccaggcgtggtggctcatgcctgtaatcccagcactttgggaggccaaggcaggtggatcacctgagatcaggagttcgagaccagcctggccaacatggcaaaaccctgtctctactaaaaatacaaaacttagccaggcatggtggtggcaggcgcctgtaatcccagctactcaggaggctgaggcagggagattgcttgaactggaagtttcscagaggttgtagtgagctgagattgcgccactgcactccagcctgggtgacagagcgagactctgtctcaaaaaaaaacaaaacaacagcaacaacaacaacaaaacacctttctgcattttcccactcctacaagtactttaactttcaaggctgttcaagtgtgggccagtcctttcttttaagtcctgatttctttcccttctctgacattaagaccaccagtgtttgctcgtgccatttccttcttatcgagagtctttcatcctttgggttcatttcaagtgccgtgccttgtttgaagcaccttgcctgacaagtctgccatttccccctccctccgcaccccaccacacacaccccgtggaagtgattgctccttctgagaactcctgcagacacattatctatgccacttacttaacaattatgtactctgtattattaatcatgtctttgatgtttacagtcttttatcagcaactacaytgcaagccttgaagacctgggttctgtcttatccttgtagtatatgtctctctcacgcacacacacacattcagcacttaacacaatgagttgtacagaagtagcactcagtatttgttgattttagaaagcaaactcaacttcatcctaccatctgcatttttcatatatctgcatttttttttttacctgctagtttatcattgctttagttctgtgggtcctactatgaatagctttattcataaagtccaaagccgaggggaactctgtaggatgacaaatttggtacaagggaaggaatccttcttaactccacagtgcacctggcattcctgtaacatctgtggcttttcctttgacaaggacatagttttacgttgtaagactaatgcctaaaactcccccagcgccactgtaactcttaccttcctttggcactaatgtaatgggaagaaagcctcaacagggagctaggacctgagttctagtcctgggcctataactcagtgaccctgggcaagtcatctaacctttctgggtcacactttcaatatttcagaaagggggagggttatacaagatcattagagctgttttatcatcttcacaaaggcagctgtttaaagcgagaaagttattgaggtgaaatctttatggcttgtaatgtcaccctttgtccttagttctgccttcttagtcacttggtagacaaagcagagacacaatactgtctggtcagggattcttgcattagggagaagggagaggtcctctcgtctcatcaagttttgtgattgtcactcatawgtgtgtgtgtgcgtrtgtgtgtatacatatatacgtatatatacgtatatatgtatatatatacgtatatatawgtgtgtatatatgtatatatatatttttttttttttgagagagagggtcttgttctctcgctcaggctggagtatggtggtgcagttatagctccctgcagcctttaactcctgagctcaagtgatcctctcccctcagtcttcccagtagctagggctagaggtgtgcaccaccacgcccagctaactttttattttttgtagagatggggtcttgctatgttgcccaggctggtctgaaactcctggcctcaagtaatcttcttatcttggcttccgaaagtgctgggattactggcgtgagccgccacacccagccttaaaaattttttttggattgttactcttaatgcatccccagtaggtctgtgttcttctccttcagatgctgggtggttcttgtatgcttcggagaatacttggggatttactcctttggtgggggctcttgccaccccatacatgtacactaggtagataaatatctctgcccatgaactgggtgaagcagcctctcccccagccactccagggagaggtagaggtggtagaacaggcaagtctcttgcccagctccaccctttgagaatgtggcagggctgaaacccaaatatctgactctgtgatgtgccaggcatatccacttacgttctggaatctcaagctcggggtggacagacccagggccctgtttggggctggttgggcttggcactgtggttgcaagagagtctgcttcttgtgtgggctgtgtggctattcttgagggagtaattgggcaacttctccatttgctcagtaagtatgtactgagtgccaagcaccctgctggctgtgaacagacgtggtccttggccacatggagcttacagtcttgtagggggcagacagtaaacacatagtcatgcaaattacacatgatcatacatagaattatgtagtattatatatgctggtgactcctcccacatttataatttcagcccattctctgcaacttcagccttggatattctgctgcctgctcaccacacctgctgtctaaaaggcttcctagtttaacgtgtccaaaacagaatgaacccccatcccatccctgtacctcccaaagtctttcccatcccagttcatgatgatttcatccttccgcttgccaaggcccctaaaattctcgtcgtccctgacttctccctttctctcacacttcacatccatttaatcaataaatcctgttggttttgccttaaatatgtcccgaacctgactctgaccatctccaccactttcaccctggtctgagctaccactggcctgtgaactcaccttcctgcttcctcccttgtctcccgacagactatttccatcccactagccagcgtgatactctaaactgtaagtcagatttcattactcctttgctcaagccttcctgtgacactgcatctcattcaagacttcttgtgttggtctacaagatatgatatgattttcacctgctcacctttcttaagccatctcatgctctccatcaccttgttcaaccccccgatatctgaatgggtccctctctctccttgtcccagtctcctatttaaggaatcaaaccctcccaggccatttcatttaaaattatccccttccctctatcacctgctctcggcattatgtacctccctttcctgttttattttgttccattgcttatgtcatcctctgatattggttgtctccccttgctccatgttgtcagagatttttatttgttcactctgtgataccaagagcagtgcctggtaaatagttgttggataaaactagagttggtgaagtctatagaaaagcataagtgaacacgtctgattgatctcctaccttagatgggtgttaaggcaggtatcttaatgaagggacttaaactgcaacctcagagtggtgttctatctctgggactggcttctctcttgccccaggcttgcgtaagttcttagatacctgggatatatatgactcctgtggtttgggtgcctcttgctgggagataccagggctgaagcaggagggcaaagtgaagctcactattggggtcctaaccaggcagtagcaccttcttgccattttatgtgtgcacctatgtcagagtggacccccctcttccaggcacacgtgatgtttgtagtccttaactcgcagggcagggatagggtggcctaatagactacaagggaggaagttaggtgatgtggattccaggcatctcttacccatcaacttgctggagaatttttagaatcatagaattttagagctgaaaaggaacctaaagatttctataacctcttttttcttacccagccattagaaagagaacaaaggtatgtctgtcccctgcctagttcacagaaacatggtgcaacctacataaaaactgcatgtgctcctttaagttgtgagtgtgtggaggtcaagatattatagggaagtggttgaggtcaagtgtattcaaaggagaggaggtctagtctctgccactttcttgagtggtaatcttgggcaggtcatttgtttcttcctcagttgatcccccgttttaaaaagataatatttccagtttccttcacagagatgttatggagataaaataagctaatggtggtttaaaaattactttcatggctacacagtgtgctcagatatgaggtcccaacacagagtttcatctggcattggtggaaaatgaagcctggggtctctgctccttcctagttgtttgtgtgactttggacaagcctcttgatctctttgagcctcagtttccccatttgtgccatgaggtgactgccaccctgatcacctttcagagaggttgtaagattaaagtgagaccctggatgaaaagagattttgtgatcttagaaagtttctattattccaagctaccaggatttttacacacaaaagccatagccagtgatttttcccactagatcattgaagcttactcttttttaaggagcaaaactataaaagaaatgtttaaaaactatttttggatgggaatctttctgaaacgaatgatatgcttctgagcaaaatattaatatacagctcagaaagaacctctggtttgggactaggggttgttgagttcataccggtgtgtacagagcgcctgcttggtgagagtgggaccacaaaaggttctttctctcaaaagtgttacctcccaaagaagagacctggggtgggggagggacctagtggtgggcagagggaaattgctgggggagagcccactccgggagtgccctgcctcaaggttccaagtagcaacactggcactgcaggaaggctcttaaatcctgttcaaggctctgagtgggaagagccagtcctacccggtcagttactgtgcttatagtagtgtgaggccacggggcttgtgagactctagggcagtgggccccaaactacgtggttcccagctgttgggctttgggggttcatgtttccacctacaatcattgctgtgtcttctgcctggtagacagtagtcacttctcttttttttctttcctttttctttttttttaagtggttacctagatatgacataaaatttacttgtrtgtaacagcaaatttttcagtctatagttttgtagcatgagtacattctttgtatttattgttgtacaaccatcccagtacccatctccagaactttttcattttccccaactgaaactcttttacccattaagcactatccatttcttcatccccccaaccactggcaactgatattctgctttctcttttatgagtttgactactctggatacctcatatgagtggaatcatgtagtatttctccttttgtggctggcttgtttcacttagcataatgttgtcaaggttccatggtgtagcatgtgtcagaatgtccttcctttttaaggctgagtaatattccattgtatgtatataccacattttgcttattcattcctccattgatggacccctgggttgcttccaccttttggctattgtaaataatactgctgtgaacatgggtgtgcaaaccaggagcaaaaggtgaatgctctctgagtctctgctttcagttattttgtgtatatacccagaggtggaatttctggatcaaaaggtaattctatttttacttttttgaataaccccccataacactttcctcagcagctgcaccattttatattctcaccaacagggtgcaagagttcctgtttctctacatcttcaccaacagttgttattttctgctttttgttgattaggtttggattggttttataatagccatcctaatgagtgtgaagtggtttatcatgtagtgatcatttatgctgggctcaaagagcagtccctccaaatctctgggaaaacagacatctgagtgtgttagaattgtgcatagaggctgggcatggtggcctacacctataatcccagcactttgggagaccaaggcaggaggattgcttgaggccaggagttcaagaaaaacccgggccacatagtgagacctcgtctctattaaaaaaaaaaaaaaattggcctgggcacggtggctcatgcctgtaatcccagcactttgggaggctgagccgggcagatcacgaggtcaggagtttgagaccagcctgatcaacatggtgaaaccccgtctctactaaaaatacaaaaaaaattagccgggcatggtggcacgtgcctgtaatcccagctactcaggaggctgaggcaggagaatcgcttgaacctgggaggcggaggttgcagtgagccaagattgcaccactgcactcaagcctaacgacagagcaagactccgtctcaaaaaaaaaaaaaaaaaaaaaaaaaagagaggaacctggcaggaaaggggctggaacaccttctgcaaggtgtggggagggagactgaagggacagggatgactcctcgtttgtatgtttttcctctggaagtcttgggacaaggagcaaagggtgaatggtgcctaggcagccagtcactaaccaagtagcctgaatcttagtttccagcctgcgcacttggagttttgttgtttttaaaggctcagagagatgtaattagcagcagctcacctttgcagggtgtttgccatgtactaggagcatcacgtgcagtatttgggttaattctcacaaccaccctatgggtggattctgttatcaccttttcacagatgaagaagctgagccttagaaaggtaatgtctgctgcctaaggtcacacagcttgtaaactgcagagctgggactggaacccaggtgtctgatctcagagcccacgctttgggccagtgtgtagtttgtcctcatgagaatgggaagaagagaacgcttttttgttttgttttgttttttaatgagtttattattgagcaccttcaggcaccactttgctggatcccttcacaaacatcatctcatttgattctccctattttacctatgggaacatgcctacctattttacatatgggaaagctgatggccaggaaaatgaatggattgccagtggttatgatgctaagagacagagctggaactcagcctgaggatgttgattcattccagtgctcacagctcgttccattgtgctgtgagccctgaccagctcccaccccacccccatggaaagaagctggtaggtcagctgtgaagtctgcaaaactccaaggactatagccactgctttcctttcacattgctgtcccttcttcctttaatttccccacccccagaccaccacctccacacctagaagccatgtgagtccatcatcttggatcaaagtgcttggcacatagtaggtgctcaataaatatgcgttgaatgttgtttgagggctcggtgtgctagaggcaatagaatctcagccaagattgtgttcctaaagagaaacacaagtagaatgcaaatattgttgtttcctcctccttctcccagagcaaacctccgctttccaacacccagatgccagggacttgaagaaaagattgtccttgctctgcaaactttgaattattcccaaattcccaaaggaaaagaggcacagagagtcatgttagcaaagtgcttgcagaatcaggtgtcactcttcgtaattaataagattaacaatctctttcttctctcagcattttgcrgttttcaaaatgctttctcaagtattagatatcatttgatctccacagccatcctgttagataggcaaggcaggactcatttttcccgttttataggtgaggacactgagacttggtgaggatgttaagatactcaaggttattgactgaataagtggcagaaatcatagagagggcagcggttccactactttctttgcagagcctcagtttctgcatctgtaaaatggggtaagcatacatcatttagagtagtgaagcgtgaaatgtgatcatgtgtgtgtgatgtgatcagcacagtgcccacacacagcacggcgcccacacacagcacagcggatgcttagatggggaacaacgcaaagctcattgttccactgatgacttatattgtactgacccttgttccacccccacttttagggggagcatagtatagcctccctagtcctccctggtcaccttctgttctggtcaccctctggctcatcccttggagtcagagtgcaatcacaagggctggccatgaatttccttttttttccccccaccctgagacggagtcctgctctgttgctcaggctggagtgcaatggcatgatctcggctcactgcaacttccgcctcctggattcaagcgattctcctacctcagcctccygagtagctgggattataggcgtacaccatcacactcagctaatttttttgtatttttaggagagacggggtttcaccatgttggccatgctggtcttgaactcctgacctcgtgatccacccacctcagcctcccaaagtgttgggattacaggcatgagccaccatgcctgtgcctggcctttttttttttctttttctttattttagacagagctcactctattgcccaggctggagtgcaatggcacaatctcagctcactgcaatctctgcctcctgggttcaagtgactcttgtgcctcagcctcctgagtagctgggattacaggtgtgtgccaccatacccagctyatttttttgtatttttagtagagatggggtttcactgtgttggccaggctgatctcgaactcctggcctcaagtggtccacccacctcagcctcccaaagtgttggaattacaggcatgaaccaccttgcccagccatgaatttcctttgatttgtaaaatctgaggtctgtcaaagagaacatctataagatagttttcctttggtgacaggtcattatgacaaatgttttattcatttagtacaaatttgcattttattatcccagctcctccaactcattagctatgtaacctcgggtaagttattttgaattttgaggcctcagttttcttatctgtgaaatggagataacagtatctactccatagggctgtcataagaattagatgaattactgcacatcaggtcttgagaatggtgcctgggacatattacctactcagtaagcattagttattatttttactattctcgccatgcttgatgctatattatagccagctgcccccagccttacagttccccctacgttgagatatacggccagtgaagttcatgtgcaaaacctgacttcttcagtgtgtcctgggttatctactgttcgacccatttattcaggaaggcaaatccgaagcaagttgcaagatagtgtcattatcatagagatagccttgaatccagcttgaatcaactctcattagtagcaaatcacttgcaacacaccctacatacaattcttgctgatctcagcaacaaccagaggctacttttctaggctatctccacatagatggaaacatttcttgccagtaggtcaaggctgtgagtgccctctgtttgtggtggcccatcttcagcttggcagaacacctccgagtccccagggcttccttcctggagctttgtgtatttctctgatacayattgtcagccgcagatacctcctctgtgaacttccaaggcactgctgataaacttccacatcagagcctctttcgcacttgatgagcatccccgcatacctagattcaaaattgctgttcgatttcttgtatactgctactgattgcacactgattgtgcagcaggcactgtagtaggtacttacacacatctcatctaatcctcctgatagtccactgaggtagagattctcctttaggggagaggttcagtgatgttaactgtgtgtcttgagggggtgggggtacacacagtgagaatgaaatatttgggtcatcagtctcaggttccttccatgcaatacccacctgactgtcaacttcaacaaaggactccctgggccctaaacaggtatctctggtttactgatgtcactgccactcatgactagcaaatagtctacttctgccaattcttgcactatatatcygaatgtgccagaaagtgcactttgtgacaaccttcatggatttgtccctccttccacctcttcctacctcccacgcagtgtctgggacacagaccacactgtcctctgttatatgggatactacacatggcattgatttttttttttaacttagtgaaagcgctctgttcccccaaaatagactgtcacatggatgagcatttcatttcccaagacttcacagcagctccaggaattgccatcactgaaatcagtataatttattaatctcctaccatgtgtgtggtaggcacaccacagtgattcttgacatcactgtttacagttttcacatctaccctgtaagggcaggcctaatttatgtccattttacagatgaggaaactgaggctgtggggggagtgttgagacacttgctcatgagagtggaggagctgctgtttgaatcctgggagttgtatcctggaggcttacaccttagccagtatgggaaactgcctctcaatatttactacatcggccttatcccagctactgtgttggggaggggaacacagcatggagagtcagttcatctcctcaaggagttcagagtgacggactgaataatactggagtttctgtggttggtttttattttttccaaatctatttccacatgtccccatccctggcccctggcccaggcagcagatccaagagtccacacagagacacacagagagccaagggtccaggggagctgaggaggcagttcccggggggacagcagcactttgtaatgtgtgtttacaccccaggctgactcctccatttcctctttgcccttctcccctatactctcatatcagatccacagagccaagagctcatttaggtctggctcagtgtgatagtcctgctgttgcctggtccatgtctggctactgaggagacaggaggccttatttggccataacttattgcttgtatgactttttataaggcccaaatgacatttcttagaaacccacatgctgtatgcactgttatttatgatgtcttcctaaggacagaatgggccagtcttcagggtcagtaggcaaaagcaaagctacattgggcccttgaatctgcagctaacccctcctgtttgcagctgagcctagctgtgtcctgctgtgacacatgtcccatggaagattcagggcctagatgtctgatccatcactgagcaccaagcagtttttctgcagccctggacagaagtgttcagcctgctgcttttgacagtaccattccttgggcatttgtctgtgatggggccatagcccagagcaagtgtgcaaggagagacttccgcccaaaggccctgtccttcatgtgtctggcccaccctctggtgctagtttgggtagggatggatggggaccccttttgcaggctgcacctggggcctcaattctagagattaaatgatctctttttcaaaacttgtgaggttggcaggcttgcacagaatccttccttgccttttaggggaagggaattggtattgctggggaattcagctggaagaacttgggactggttcagaggggtcaagccactgtctgtggtctgctctgcacagaggtggtgctggtatccgatccaggaaatctgactccctttcctgtgccctttctaaaattccaccctgcctcattcctgcaaatgtgtgtgcacatattatacatgtatatctcatcatccagatggcttatggtctacttgggagaggaagcaaagacaaataaaggtgtaataccacttcaaacaagacagcatgtagacaagtgctaagtcatacagtgtagacaagttgagacaaaggcaacatgtagacccttttaacaagagttgggatgagagaggtccctgggagctcgagttacggagggaagatttctgaaggtggtgggactcaagttgctccttgggggattgggataggacagatattggaagtaagtgggcatagtttgtagaagggttagtgatttgaggaagtggtgcaggttggagagaagcaagcagtacagtcttctttattgtaaaagttatgtgtgctcatgtaaaaaatgtgaacgatatgagaaagctcaaagaagaaaatctttgtactcttacccagacagagtctccattctcatttggtatttatctgcctgtttctttttatttagagatagggtcttattctgttgcccaggttggagtgcagtggagctattatagttcactgcagccttgaactcctgcgttcaagtgatcctcccaccccacctcctgagtacctaagactacaggtgcgggctaccacacccagctaatttctgtattttttatagagatggggtctcgccgtgttgcccaggctggtctcaaactcctggccacaagcacttctcccaccttggcttcccaaagtgctgggattacaggtgcctctttttcttttctttctttctttttttttttttaaaggcattgagatcaaatctgttgtgtccaccaagattatggaaggtatcgaatagtatatggggacgcttaggtcaaagggagcctctgttgcttcttgctcaaggggtgcagatgaatgtagttgtttgagaagagacactcaacatctgtgagcaggcaggatgggagcctgggacgaagcactggctttaccaccccagacttgggactctttcattacccactgcatgagagtctcaggtttaccattctccactgctgccccaggggctcagagaaataatttctcctgaattgtctcaaaagcttgttccccacctgccaccctcatccctccccatcccccaaattcctctcttttccatttactgcccagtttcttaagcatttctcctcccctagagttgttggggacacagccggttttgccacactgcaaacctttgctgctgcatgaggtcatttcaggggagaaactatatatagyggaggactagcatcaggacagctccacgttgttcaggccggttagcatcgcccttccgctgatgcaggcagggtcacctcggattcagcactcatccagtgggagtgtggtcaggagccccgaggaaccggggcaaggtcgtcttatcttcattgccctytctgtgtaagcccatgaatctctggttcctcatctgagtgatgaaggagttggtctgggaggggaattttgcaccgtttttcaaagctacttgaaccctttctggggtaagcttacaatgtagcttgatatgtacaaccaactgggtactgcactggttgaagccggagagaatggccccccaaagggttccacttatgtcctggggtcctagagggcacacagtttgaaaaccactgagcaagctgatcctctgaggtttctttcagagagtctggcctcgtgcataggatctggcataaataacgcataagcagggttgcaagctctgtgacctttggagacattgatgatcatcttgggtagcctgggggtgtggcatagggacagatctcagggcagagtcttttggagttggggcagctaggccatagcacagtttgcagatgcagttggacttgctggcctgcatgttgaagggctgtttctttttctgcctgctcctgcctgcctttctttttagcactgagttgccccaaagaagagatgaaaatgaggatttaatgcatttcaggcaaggaaagagcatttaatttaagttgtgtgtggctgagttacacattttatagagagagtatttgtcgagcacagtggtgcctttggcagatataggaaagccagaacgtggggccagtttttcttcattcagcaagtatttgtagagcgccagctttgtattcctggagaagcagagaagcgcaagggagatcccagctgtgttagagctccttgattgcaagtaacagaaaccaactgaatccagcttaagcaaaaagggtgatttatgatagggcttcatggaggactcaggaccccacggcagggttgctgcctggccttaagcagggattagaaaaaccytgttagattctccctctctctcakctctgcttctctttgagcttccttcacttctctgcagcctggctttcccctcctgagcccacacggtcccaaatgttcctgctgcagctccagccacactcagatgtactgagatctcccagtccaaagtccatattcccatgggagaaagagagtctggttggcacagcctgggtcacatctctaccctcagtctactcagctccagccaagggatggggtsacacgtgatgaaacaggtctggcaggagccactcctgataccatgcagatcggaggcagctccaaacaggggaactttgacagccacaaagccgggtgctcctcgaggctttgatcaggagctctggtcccagggaggaaactgggtttatgtggaacatttaatagccacataaggagacaatgaaagaagtgaccctcggcagagcccacctgttgccaaatacatggcttttccagttggggctgtcagaccagcgggggccaggggctccccaagcctggtgtcagcaggagcccctccaggttcgctcaggggaaaggggctttgttggaaggattttggcaaggcagcctggcctcctgggagctgaggctggaaggcagtcaggagtggaggtggccctgtctttggggagctgtgtggcctctctgcttttgtctgagcatctgctcctggcctccctcttacagaggacccagrcttctcctcttacatgtcggcrtgttccatggttgaacacacagtgccaccgtggatggcttctctgggtcacaggcagccagtgagggggctggacctcgttgactgggaggctgcccctttcagggctttgggcagggcagacattagaaatccatctcctcggccgggcacggtggctcatgcctgtaatcccagcactttgggaggctgaggcgggtggatcactaggtcaggagatcaagaccatcctggctaacgtggtgaaaccccgtctctactaaaaatataaaaaattagccgggcacggtggcaggcgcctgtagttccagctactcgggaggctgaagcaggagaatggcctgaacccgggaggcagaggttgcagccgagatcgtgccactgcactccagcctgggcaacagagtgagactctgtctcaaaaaaaaaaaagaaacccatctcctcgcatctcctacagtcaggggatgctgtggacactggagagcaacgccttgacagctggggggagtggggaccaacctgcaccaaagccagggtgcagggaggggagggcagtaagaggtggggcctgatggcacctcggatgctgactgcggggcagggccatggaggtgtgaggagccacagggagcctgtgaccagggagaggcagggcacctgggagggcattgctggactccaaggatgacaggggtagctgggaaaggagtagggcaggatagaagacagggagaccacctgggagcctggtggcactccaggcagcaagggagggtcaggagtggaagggcaagaggtatggaagacgctttcaagaaggaggtcccgaactttggcgacagtctggctgaagcagagtgagggtccagtggtaggggctctggggaggggcctggcacaactggggcttgaggaaggagagagatgggcagctagaggagtggagcgccactggagagcctggtggtggtggctgagggtggagagatctggggatgtttacagcaggaagggaagtccctgggtagaggaggagctgctggagaatggctcctgggcccaccagctctgcccctcaggagctgtgacagtggccaagtcgcctcagctccctcatcttcaacgtggggacagtctctgcccagtccccttgccgaggtgtggggaagggctgaggttgtgcatgtcacagggctctgtgcactgggaagtctcgtgcggatgcaggcagccttgtgactgcagtcactcgtggcatggcactgcccggtggccctctgcgggatcagggaggcttcttttctggccctgggatgtgactggacatgggctccactacaacccatctcctgggcatctcaggccggtgaccctgctgccaaccgtgttcccggtccctgggggtgagtagagaacagcaggtgcccaggcctcatgtctgagggtctaggaatgaccaactgcataggcctaggatcccttcacccacactggcttctgagatccctggtggtgctgtgtgtgtgtggagaccagcagcagggctgaggcaggagggaggtggctgtgttctccttcctgggcaagtgaagaggccataggggacgtggttgagtgggggacagacacaccccatttacttcctagtgtggaactggaggggccgctccgagaatggtgttggcctccttggcctgcttcccagggagaaaatcttggagcacttgtttcaaagatgccaggagagtggggaatgctgaaacctgcatcctgttttgctgctggcctagggaagaggacccagatggggacagtagatggtggcagagactggaatactgggtgcatcttggggcccacagagctgggggaagcagatgggggttgaggcgaggacctgaggtcaacaggggagaacctgcggcttccttcctgtttgatgccgacctcgctccatccaggactgcctggcagcctggttctttctccctagctgcccctccccgaggacaaggccctctatcctctgcagccgacatcccacttttcctgtatgagtcatgcctacyggcccgaggctgcctccagctcacctgcagcttcctttctccaggaaggcctggcttctatgtgtgtcttccttgccctccagcccgttyggctatttctgttcattttccctccacggagcatctggcagagctgcctgctctctcccaccccaagccagattttgtcttctcctgcctgctcgtttccaatctcagaccccttggagcattattttttctaaagtgcagcagctgtgcatctccctggtctgcccagctgttcttgtcsttgactggagagtttatgtcacttgtgacaataaataggaaatgagaatgagagggttgccagactgcccttccagctgcctgaattcctctcgggaaacaaggagagaaataagcacaataaggctaacacttagaagtacttcccatgttcacttaatgttttccagatgtagtaccaaaccttttccatgtattatctcatttaatctttgtagtaactcaatgaagtaagttgtatgatcatcctctcacagcagggaacacagaggcccagagaggttgtgtaatttgcccaacatcatcaatgagtaagtagcagaaccagaccagaacctgtatcagtctgactcccagggcactctcctaaccactagaggaggagacrgccatgggccaggcatctccggagcccacttgaacttcaagttttcgttttctctagttgcctgttgcaaataataacgtgctcaaaggagacctcatagtgtcattctcagagccatcctttgttctcctttctctgtatcccaaacagcaaaaagaacttttggatggtagaggttgtagtatttctctttgcttggagtccccctaccagcatcccattttatagtcttccgtaaagctttaagaacttcacgacattatccttgcaaataaggggctacagaggaagaaataatagcctaatcttgacttttctctgaygatctttccacttaaatcatgttcccttctctcctgagcatgcttgaaatgccccaagatgcctgttctacacattctgtattgacagggaacatttctgctctttgtggtaaaccttttgtgtgctattattgtccgtgagtggtgattgtcaactggggagagagagggagaatgaatcacagtctctggggattggggcaagtgtgaaatttgaaaagcatattcaggatcataatctcattttagctttggaaaaatatattgttttttaaatgtagacaattaaagaaagtggacttggacaaaatcttgcctgatattgcaggaattctcaagtgaggcatagcagttttaggtgggggtgtatatgggaagcctgtatgttgattaaaagggggtatgtgctttaagaggctaagaagctgtctcccaacaagagactgtatgtgtcctgtcattctgtctcccacagccctgcaggtgtttactggaggtctctgaggatggtgcatactatatggggcatcaaaaaagacccaagggcttggggcttggggcaagtgcactaaacaccactggtttactaactgggaccttgtagcttagtggttaagagcacaggttcggctcagaccatggcagagcttaaatccaagctttactgctttgtggtagtattccttaacctctaaatgtctcagttccttcatctgttacatagatggtggtagtacctaccctatcatgtaactgtggtgattatgtgggataatgcctggcacctggctggtagtcagtgatggtggatgctgtttcttacccatcctacctgctttgtctcagttggatcaaaccctcatggggctctgggtggctgacccaatggctttgtcgaaatgaaagtgttatgtggtccttgaggtcctggttcaaggctaatctgaagcatctgtctgcataaagcccagatgagcattgagtttctccatgcccagtgccgtgcttkatcctgggtgtgcagctgagcaaaatagatacggtccttccctcccaggtcccacagaataacrgggaaacacatgatactcaggtaatcaaaatgtaagacatactacaaaggtaagaataaggtactgggagagaattatggggtaggagaaatgaattattttggaatggagggtcaggaagccttccctgaaaaagagacacctacgctgacacctggagactgggactgagggagccgtgtttgtctcatgtgtccccacccctggccagggctgcctgctggtccatgtaccacctttgggtgaattagagaaagatgcctcctctgggcaggggcacagctggagagagaaagggaaataagcaagtggccaccccggtttctgccctsttggggtaaggaggtgttttccctttccaggagaaaggagagagaggccgtgtccaggacactgtccggagctgctaaactggccagcaagtgctcagagtctggttttcatgggctgcagttggtgactgtctgctgtgaccttcttcccatagcagatatctcttccacaatgttctataaagagagaggaccactaggagggcaggagggagagaggagggagatctgctggggaagccgggccacagactgaggccctgggcctgccagctcccatctcgcctccccagcacgagtgcctacttcatgctgagttctgagctaaccttgttatttaatctgtagtgttttgttttgtttgccttctcacctgggacccgcctttcattccacaggtaggggtgatgaactcaatgcaaatgatggttggtaaggtgagactctgctgggtgggcagctccctggctggtggagggcacgcttgaggaagtggcatttgagttcacttctaggtgcttggatgcctggcactcatgagtggaagtttccaggagttacttttctgttccccctgagggagatctcctttcccaaaggagagtggtctgacgtgggaacgggctgcctctgagagcccagcctccaggggtggtgagggtcactcccagggattcttgcgtcagctggggcacacgctgcagagccttccacgacctctctgactccagtgggatctggctctgcaaaagttaagcccttctgccatagcctggtagaggctttttctaaatcaagctgggagggccaccctcaggcaggcaggagcagcagcctccagactaaccagatcctggagctctgtgttctgggtccctgatctccctgaagccccagctacggagtttggtccagatttcccccagcagcagctgggcagcagtgtgtgcctggccccctttggagtgggtcacacacccacctggccaggctctgrcatggaggctggcactagaatgggcttcagggatagcatgcacctgttttgtgctgctgttgtcaagtagctggccttgggcttcttggaactacagatgtttgcgtcattggactgattgtcctttgactttttctttgccatactgactttctgtggccatatggttagctttggatacagagaggtgtgaggtggtcccacagtgcctgccacaacatcaagtttctrtagatgggagcccttccgtaaacctcagaaggtggcaagagcatgtctgacagtgattggaattgagctctgcaagacrtagacaagatcacctcttcaactccagagtgttgtggcagggcaccagagctggaaaagcctgaaaggtcatgtccagctgcccacgcaatgtggggtcgttccacttagcacccttgccaggcattcagccagactttctttgggcgaggctagcttttgaacgcactgaatgcgttggcctgtctctctgtagagtgagtgcctgtgccctgtctcattgcccacaccatggccttgtgagagcagctccctccgatcagtgtgaacttggctgagcccaagtgtgcttcctttgtgtctctcactcactggttctgcctgagaagtttgtttcctttaggtaaagttttcctgttatagctcttggggtttgaattgggtgacttgtcttacagagtggtgaagatcggagacagggtgtgtaacttgcccaggtcatctcaaatttgtggccaggcaggaaacacaaccccagagatgcttgatcttgtcattttgctgctcagacacattctgcctcctttctgacctccagcatgttttatgagcaagattctgagagccctctctaaacagcaagtcagagcttttagcttcctttctctttagattgtacctggctggtgggtgaaggtgagggtggggatagacatgtaggagccatttggtgccaggaataagacaaagcagcttggaagaggggtctggagggagccagggtgtgatggctgagtgccacagaggagggccatagctgcagggccagggccaccctggccactcctgcctgcgtctcctttagaggctttcatctccctgactcctttctttttccgctgtctccttttcctcttctgttgaggcatccctgagcgttccttcccctgcctacctggagatctccagaccttaagatttagtgtccttgacacagcgtatttctttataatgccttcctcttcgggctgtgcacccatatcacttcagagccactcctgcctgcacctgggagcattaacatcagagccttaaccagatgctctggatgctgcctgccagccgcccagaacacttaattatcttttgcgggaagtgacatcttaccccaccgggacattttatagacagtgtcttcaccctgaaggtgggaatttcatgaattgtggcaggtcaacaaggtggccatckgggagcaatagagggaaatgggcatttgcggagtgtcttccatgctccaggcacagactattgtgttctcccagcacctggtggtgtggcatcattcatctccattttacagattggagaactaaagcttgctagggtcaccgggccagttactggttggggtcagaatgagaatcctcttctgcttggctccagagcccaactcctcctggtctttgcagcctgtctgcagggcctgtcttctccactgtttccttgctagcactgagcccagcacctggcatcaacatgaagcgatrgttgtagaaggtgggctagagctggcaggcagggacttgagcttggtagagccaggatagttgggaagatgatttgggcacctgggggctggggatgggggcggtatttttcctctgtctttgtaccttctttgggtgtaacttggtggacatcagagttcagagttgaggtggtgcrgggtgtagcagacccagaattaaggcaggactgttggtctctgtggcctcgtgagactgctgaagacccgacgtcccttgttcctgctgcttctgtggcagctggagccagtgagatgatgccccttccccatttactgttttctgcagttctgcctccgtgacagccagcaggatgagtgtggggagacccgtaagaggggctagaatgaatgtttgtgtgcatttggttttgtgttcctcagcccttctttagcagcaggacttggcttttaaacctgccatgggctccgaggctgccctcccaccctgatcacagtgcccctgctccttatgggttcctygctctgtcacccaggctggagtgcagtggcgcgattatggttcactgcagcctctacctcccaggctcaggtgatcctcccactttagcctctagagtagctgggaccataggcatgcgccaccatccctggctaatttttgtatgtttttgtagggatggggggggtctcactatgttgcccagactagtctcgaactcttggattcaagcagtccrcccacctcagcctcctaaagtgctgggattacaagcatgagccaccaagcccggtcccccatagagtttttaccctgactggcacacctccttcttctagccccctcttcctgatactcccaaatcgtaggggttggctgggaacaggattcaccattcctcctggaggcaccaagacaggtttttgaggactacgatgacttatgtctcattgatgctctgctcaccctatgaaggcaggtgcatttctttgtggaaagctgccctgctgcgttgaaggggtctaatgatacagtggcttaaagaakgaggagtttgtttttctgtctcatgtaatggccctgatgtcctcaacrtgaacagaccaagtgagggggcagctcggctccttgtggtcacctgggatcctgtttttttgaagttgctgccacatcatagaacattgttgtttgcatggttgaagttgggttgcagccatgtctgggctccagccagtggagggggaagaaagggtggaggaggcctgcctaccttccctaggccctggtcctccatggcccatgtgcagcatagtcacatggcctccctggctgcaagcaaggctgagaaatgtctgcctgggctgttgtgtggccatgaagaaggggaaagtggctttgggtaggtaactaacagcctcactacagaagatggagagtmttttcacttgtgtgtgctgmgagaagaatatgcctccctgctagtcatgtgcccacactctttggcaacttgcacatgtgcccccttccttgggaaacatctgtgtgccagactatgctgcaccaacttaggggaccagaagccaaagaaggcaatttctgccttttagcaactcacagtgtagtctggagagggtgtgtgtggaacccagacaatctgtaaatgccaaaacagagaatctcttttgttgtatgctgggcaccgcagatagagagctaaaagaccacctggggcctccatatgctcgcagttgggtggactggaaaatggartgaagtgctgagagcagtgtggctgaggaattaggagggcttcacagaagaggtgacattctagctgggcgccgacattttctatttcaaaagatggggtatcttcgggagagaaaaccaatagcaaaggcatggagacttggaagctcatggagggctagtggctcaggtgtggtctgagcctagtggaagtgagtgagagaacaggtcccagctgtctatgcggctcacttctccstccactggcctctgcacccatctccatattagaggccttctctggtcccccattctcaattctaatcactgtatttttctgcttaacttggggatgacatataaatacctgacatactctagatggccttgtgcattgtctgtctctcctgctagaatgtaaactgcgggagagcaaggactttgttttgtatgggtaaatactgggtcctcaaatatttgttgaatgaataaatgaatttatgggaatgtggtaatgtggactgaagatcatatttttggaaagacttgatttccatgctaaggtgtttggcttttatttttaggtagtggggagccatagaaagtttttgagcaggggagtgacataatcactattaacaaggttcctggcagcagcaaggaagatggtcagagtggggagagagtgccacttccctggccctaggtcagctccaaagcaacttaccctgcagactgatgtgccatttgtgtagtctggaagcctattcrcagtcattgtgtttggggcgaagcagaggattcgatctctggcagggcttcatccctaagggtctaacaagcactcttgtgcactgctggtggaagtgaaaattgatagtctttctggaargcaatttggcaaaaggtaacaagaaccttaaaactatccctgctctttgacctagaaattccacaacaaggactttatcatagagaatgaagccgaagtgtgtgcaaagctttatgcactaagactttgattctagcgtgaaaaatggaaagtctaaatgtgtgactcaaggacttctcaaatccatcctctcatctccatcccactaaaactctgcctgccatgatagacacaataaaatctgagtccaggcccctgttttttcgctcctcttctaatgcagcagcctcttaactgatcttcctgccttcattcaagactccttaaacccactctccacatggattccagagtgaacaatcaaaaatgcctgccttacatatcatttggggtcaggaattcaagaccagcctggccaacatggtgaaaccccatctctactaaaaatacaaaagtcagccgggcatggtggcatgcaccggtagtcccagctacttgggaggctgaagcaggagaattgcttgcttgaacctgggaggcagaggttgcagtgagccaagatcacgccactgcactccagcctgggtgacagagcaagactccgtctcaaaaaaaaaaaaaaaaaaaagaaatgcctctcttaggccgagcgtggtggctcacacctgtaatcccagcactttgggaggctgagacgggtggattacctgagctcaagagttcaagaccagcctgggcaacataggaaaaccctgtctctactaaaatatgaaaattaaccaggcgtggtgacaggcacctgtaataccagctactcaggaggctgaggcatgagaattgcttgaaccaggaggcggaggttggagtgagccaagatcgtgccactgcactccagcctaggcaacaaagcgaaactcttgtctccaaaaaaaaaaaaaaaaaaaaaaagcctgccttggcaggctgcggtggcttatgcctataatcccatatgcgttgggaggccaacgcaggaggatcacttgagtccaggagtttgagaccagcctgggcaaccctatctatacaaaaaatttcaaaaagaaaaagagtgcctatccttccttggctttgccccttcagaggctctcccatcccttagggcataatgtccaagttgtgtcactggcccagaggccctcactgatctgcccttcttttttatttatttatttatttatttatttttatttttattttatttttttattgatcattcttgggtgtttctcgcagagggggatttggcagggtcataggacaataggagggaaggtcagcagataaacaagtgaacaaaggtctctggttttccaggcagagtgtttgtgtccctgggtacttgagattagggagtggtgatgactcttaacgagcatgctgccttcaagcatctgtttaacaaagcacatcttgcaccacccttaatccatttaaccctgagtggacacagcacatgtttcagagagcacagggttgggggtaaggtcatagatcaacaggatcccaaggcagaagaatttttcttagtacagaacaaaatgaaaagtctcccatgtctacttctttctacacagacacagcaaccatccgatttctcaatcttccacctttcccccttttctattccacaaaaccgccattgacatcatggcccgttctcaatgagctgctgggtacacctcccagacggggtggtggccgggcagaggggctcctcacttcccagtagaggcggccgggcagaggcgcccctcacctcccggacggggcggctggccgggcggggggctgacccccccacctccctcccggacggggaggctggccgggcggggggctgacccccccacctccctcccggacggggcggctggccggcgggggctgacccccacctccctcccggacagggtggctgccgggcggagacgctcctcacttcccagacggggtggcagccgggcggagggtctcctcacttctcagacagggtggccaggcagagacgctcctcaccccccagacagggtcgcggccggccgaggcactcctcacatcccagacggggcagcggggcagaggcgctccccacatctcagacgatgggcggcygggcagagacgctcctcacttcctagatgggatggcggccgggaagaggcgctcctcacttcctaggtgggatggcggccgggcagagacgctcctcactttccagactgggcagccaggcaaaggggctcctcacatcccagacgatgggcggccaggcagagacgctcctcacttcccagacggggtagcggctgggcagaggctgcaatctcggcactttggggggccaaggcaggcggctgggaggtggaggttgtagcgagccgagatcacgccgctgcactccagcctgggcaccattgagcactgagttaacgagactccgtctgcaatcccggcacctcgggaggccgaggctggcggatcactcgcggttaggagctggagaccagcccggccatcacagcgaaaccccgtctccaccaaaaaaaaacgaaaaccagtcaggcgtgcaggcactcggcaggctgaggcaggagaatcaggcagggaggttgcagtgagccgagatggcagcagcacagtccagcttcggctcggcatgagagaccgtggaaagagagggagagggagaccgtggggagagggagaccgtggggagagggagagggactgggactgatctgcccttctttggcttcattctgaccacctcctgcctcgtgtgatctacctggcagcactgcttgcagctccacaaacctgagcccagagtaggctcacactgcctcctctgtctggcgagcccagcccccttgcccttttgcctggctaactccagcttgttctttggtacttggagcaaactttaagaccttccgcagagggggtgagaccacattcacgtgtccccctgattcctgtgcatatcactccccttgcatgtgtgcattagtttctaacaatctcctgacatgtctgtctccctcactagctctgaccttgagagccttagtgactttgtgtccgtgttccccagcacggggcctggtgcatactagaagctcaatacatgtttcttgaatgaatgaatgaatgaatgaatggatggatgaatcgatgaatgaatgaagaatgatgcaagctctttattataagaaatgcatcctgagctgtgcatggtggcttacacctttaatcccagtgactcaggaggctgaggcagggggaatgctggagcccaggagtttgaggctgcagtgagttacagtcrcgccactgcactccagcctgggctacagagtgagaccccatctcaaaaaaatttttacaaaagcatactttatagtgctcagcacatatttgctcaataaatatttattagatgattctgtgtgaagtaaaaacaggatttttttgaagtgttatatttattctatattttctttatgtcctgagtcgatttctaaggmtagaacctagggaagagggggcacaggtaaatccggcaagcagcaggggttgagaaccactggtccagcagctggtttcagattaaaataaaaacaggatcgtggacatcataatggtagaagcttgtacatgccatatgatctcagcaatatgaatgctaattgagaggaacaaaagaaaatgtctcaacatattattgctggttatttgggggtgataggatataggttacttatgtttttcctttttatgtttttattatataatttctattttaaaaattttttaaatttttaaattttttatttttttgagacggagtctggctctgttgcccaggctggagtgcagtggcgcgatctcggctcattaaaagctctgcctcctgggttcatgccattctcctgcctcagcctccggagtagctgggactacaggtgcccgccaccacgcccaactaattttttgtacttttagtagagacggggtttcaccttgttagccaggatggtctccatctcctgacctcgtgatccgccctccttggcctcccaaagtgctgggattacaggcatgagccactgcgcccagcctattttttttaaatttaacatatgccatcttttttttttttttgagatggagtcttgccgtcacccagtctggagtgcagtggcacaatctcggcttgctgcaacctccacctcttgggctcaagtgatcctcctgcctcagcctcctgagcagctgggattacaggcgtgcaccaccacgcctggctaatttttgtattttcgtagaggtgaggtttccgcccagctaatttttgtactttatgtagagacgaggtttcaccatgttggccaggcaggtctcaaactcctgacctcaagtgatctgcctgcctcagcctctcaaagtgctggaattccaagcgtgagtcaccaagcccggccgacatatgtcatcttttaaatgtaaaaaataagaaaagtggttggaccagagactcctgactgtgcttgggatcactgggtcatggagccagtccctgagcttcagcctttggttagycccccaggggcgattctaggtatcgggtccattcctgaccctctggccctttctgagcaccagcatcctggtgctccgagaaactgtctcgtgcccttggaaactgtgataaacagttcctaggcccacaacagtctcccctgtggtttccaggtccccaggtgagggcggagcatgaggaatgtgacaggccatggtgtaatgggattttgctaagaatttaccaccaggaggtagtctccaaatgggtcccagaatagaaaaactggcctgtggtgtgatgaggagtgggaccacagacctgggggccaagaccagcaggaagactcagcaacaaggcattgtgatcctgggggctgggtagttggccatcctggcaggcagttggaggtgggcagggacagccaggtgggacactgagggttagaaaggtgagagagtcaaggagtagatagtggggggctgactgggccgggagagcagccagtggagggagcaccttgggtcaaggcgctctcagtctgccatctcttggccctggagcaaaccaagcagttggagttgtctgcagggagatttgtaagttcacttgtttgctgtttcatgccatcttcctcccaaagcctttcctgagtctcttcctgtatatgttccacagttaaggcgagctctttttctcctcgaaagctctgttgagctgggcgcagtggctcatgcctgtaatcccagcactttgggaggccgaggcaggcggatctcccgaggtcaggagttcaagaccagcctgaccaacatggagaaaccccgtctttactaaaaatacaaaaaaattagccaggcgaggctggtgcggtggctcacgcctgtaatcccagcactttgggaggccgaggcgggcggatcacaaggtcaagagatcgagaccatcctggccaacatggtgaaaccccgtctctattaaaagtataaaaattagctgggcgtggtggcgggcacctgtagtcccagctacttgggaggctgaggcaggagaatcgcttgagtccgggagacggaggtcgcagtgagccaagttcgtgccactgctctccagcctgggcaacaagagcgcaactgcatctcaaaaaaaaaaagaaagaaagaaagaaagaaagaaagccttgttggtctttggtcttgcctcttatcaccttcatcactttctaatgttgtgctcttatttccggtgtgtctcgggcccctaccaagggcagcctggagtctggcgcatcttcgcagtccatgtgggtaggacagtgcctggcccatggtcagggtccaggggaggaggagtgctttgcatccactttcccagctggaaagctctgttcctggccttgtggctgactcctgcatggtgtttccctgggtcaccacggcgacaagatgctcacttgcaagcaaataggatcccctgcccagggctgccagcctcagcagttcttgacctccagctgagctgaaactgagaggatgccctgggagctgagcccatagggctccctccctgaccctttggtgactgtgctgaaagcagatacctcctgctgccccgggtktgctgccttctcctccccacccactgctagagcctgtctggcatctatgaagggaggacgtttgggccaaaacaggtggtggtctcctagcacacagctaccaactgcatcctgtctgcaagggagacttcttcccggggctttgctttctcctgggtttcagcaccatggaaggccgcctatattctacgccatagcgggtgggagaagggtacgaggaggctgctcttgcctggccttgggctggtggagcgtgtctgagggaatgaggcctgatctgtctgccctccctcttcacagcatccccctttgccccccacctccaccaagtctgactcagcccttgcttgacacagatcttaagctctgggctgggtgtggtagctcaccctgtaatcccagcactttgggggactgaggcgggcagatcacttgaggtcaggagtttgagaccagcctggccaacatggtgaaacccgtctctactaaaaatacgaaaattagctgggtgtggtggtgcagacctgtagtcccagcttctcaggaggttgaggcaggggaatcacttgaacctgggaggtcgaggttacagtgagctgagatcacgccactgcactgaagcctgcgtgacaaagcaagactccatctcaaaaaaaaaaaaaaaaaaatcttaagccctcatcagactcgccttgggaggggcaggtgatgtgggccacagcccatctgccctaggccagcggggccctgaagccttctactgcctggaaaccttgcaggcaggaccagctgcaaccttttctggccagcttctgccgccttcccctaagacaaaggtctgaggacagcttgccaagggttccactggtttctgcctttccacagggctcctctgttgggccctttcccacttcacccccttcccaggaaaccagagctctcaccacctcccatgtggtccactcgctggttcattctgtcagcttttattgagcacctattgtgtgcggatcattggcctgagccctgggactgagatggggagggcccagccctgcccttacagcttgtttgtggtacaattcgcacaaagcggcttaaatgggagctttgtttgatccaaggcagctagaaacagtctttccttcgaggtaccttgtagaagacactccaagtcctggctaagctttctccactttgtcatgacaaggatcttttactgcgtttccccctaagtctcaagattttctaccacaccacattcaagccaaagcttaaggcactaaggaacacacacgcgcgcgcgcacacacacacacacacacacaccacacaccacccttactcctaaaaaagctaatacatgcacaaatatatatcctagaatgtgaaaggtccactaccccacttctggggtagaaaaggtggtgtgtgttcctccagattttttcccttgcagatgctaacactgtctttacaaacttgggcccatttgggagctgccagtttgcttgggaggcacacagcctccaagggccaccatctgacccctggcagagactccagcccacacctctgcccagagtagaaatgatgtcaagctctcagtcctccttgcccgcctccccaccaagcggcactcagccagcctttctaaagccctctgttgaaagccctcattggccaggagggggcggcctttctccctgccacccccttgaggcccacactcctctttgcctggaagaagagggtttgtgtggrcagtgcagaaatctcacctggactctggaggctgggggcttctgggcttttctgcccattcttcctcactctggccatatctctcacctcctctgtctcatggccccaagaaaccaagtcacagaggcatcaccatccaggytggccaaagcctcctttctggactggcctgctaccagctccgtgtgaacggctagttcccatatgctgataagacatatcaacagctaggtcttagcatttccattaaacaacagctaggtcttagcatttccattaaaaaaaaattacttggcctggtgtggtggctcacgcctgtaatcccagcactttgggaggccaaggcgggcagatcacgagatcaggaaattgagaccatcctggctaacacagtgaaaccccatatctactgaaaatacaaaaaattagctgggcgtggtggcatgtgcctgtagtcccagctactctggaggctgaggcaggagaatcgcttgaacccaggaggcggaggttgcagtgagcagacattgagccactgcactccagcctgggcaacagagcaagactctgtctcaaaaaagaaaaagaaaaagaaaaaaaaattacttgcagctgtagtggctcatacctataattctggcaccatgggaggatcacttgaagccaggagtttgagatcagcctgggcaacaaagtgagaccccatctctacaaatttttttttttaattagctaggtgcagtggtgcactcctgtagtcctagctactcaggaggctgaggtagaaggatcgcttgatgccaagtgttcaaggcttcagtgagccatgaccgcactactgcactctaatctgggtgacacagcaagatcttgtctcaaaaaaataaaataaaaaattaatgtatcacctacatgtagttggagagaaattattattattattattattattattattattattatttcgagacagaattttgctctagtcacccaggctggagtgcagtggtgcgatctcagctcactgtaacctccgcctcccggattcaagcgattctcctgcctcagcctcccaagtagctgggattacgggctcccgccaccaagcacagctaattttgtatttttagtagagatggggtttcaccatgttggtcaggcttgtctcgaactcctgacctcatgtgatccatccgcctccgcctcccaaagtgctgggattacaggtgagagccaccacacccggccaggagagaaattctttagagacctgagtgaggtggtcatacaaggtcttcgtcatgacacagttgggagttgtcctttagtcccccagtggtggcacggctggtcagaacaggagcctgacagccagggtgaaggagactagagaagaagaaaatggggcaatctgtgggtaccccagctagtgtttgattttaaaatgacccctgcccaccatactgcagacttgtgttcagacatttatgtagacctgactttgtcaatgcagaatgaagaccagtgtctcgtaggaggccagtgggcccaggggcagggtgcccatcagaacttgaagggtctgggccaactcatggggcctcagcttatcctgccggcctgcacactctacccagcctgactccaggccgtagatgcttctgtaccttctactgggaatgactcctacctcaccctctttcaaggccaggatcacaatgtcattcctcctctaggaagtctccccaaatttgttccttccaagccttctgaatctcctttatgccacttcctgcttgtccagtggtggagtcattcggtcatacattcattcattcattcagctcacacaggaggaggcacagggtgcaactgtgagggagagaccagggccctcccttggaggggctgaccttcggagaggtacagagaagtgaggaaatgatggcagaattggagtagacgtgcattcggacaacaaggggtgtggtggggactgagggagcccactttagttaggccagcagggcaggcctgtctgaggaggtgctctttaaaccttgagacacactttaaggtaattagaatgtctccctcattttctcagccccttgagtgcccggcaggatcttaaacacagtgggtacgcaggaattgtgtgttgaaatgaatctaggccatgacacttttgtctgggcctgagcaccctggtaatcatcaccctttcctgctgtaggaccccccagccccacctccagctgtcatttgaccatgaagaattgggttaccttgggggtcgggtggtaggggctgctcccaggccaagcccattagcaccaggggtaggatagctagagagcaggggccagcgacctgcacatagcttggaggatacatgtgacctgtgctcttgcacctggattcttgatcagaaatgcctcacctcccctgtcaccctcattattgcagaaggaaactgaggcgcaaagcttgtatgctgcctctccctccagcagcagcagaggccaaagcagggcaggtcactgtatgtggagagggtgagtgaggtaagaggtctgaaaagagggaggagggtgaggcttgctcccacctgggccctcccagccagccggagcctatttccagagtccttgtcacacagggtcagagctggacatgaccttagagatgagctaacccagctccctccatcccctgcagtagaagcagaaaggaggcctggtctttcagggtgtgtgcttgtaacaggctttctctttttttttttttttttttttttgagacagggtctctctctgtcatccaggctggaatgaagtggtatgatctcaccccactgcaacctctacctcccaggttcaagcgattcttgtgcctcagcctcccaagtagctgggactacaggtgtgtgccaccacacctggctaattttcatattttaagtagagatgggctttcaccatgttggccaggctggtcttgaactcctggcctcaagtaatcctcctgccttggcctcccaaaatgcttggattacaggcaccagccaccatgctcagccccaacagactttccacatacctctactctagcgcataccagtttgcctgcttgttttgctttgtttttaaawtttacatatattggccaggcacagtggctcgcacctgtaatctctgtactttgggaggctgaggtgagaggatcccttgaggctaggggtttaagaccaacctgggcaacacagtgagacctcatccctattttatttttaaaaaagtaaaaatagaaataaaatttaaaaatttacatatattatttattatacatttgtatgtttttaaaatgtaccacagagtaacagattacaaagatttcctaaattacacattcaaatatattcaaaatagtgagcatgaacaaaatgtctgagaaaactaagagggatccttgtgtgtatcatttgtgtgattcagcttcagcccagacagtgatatgagctcgtctggtcagggacttgccatgctcgtctggacgtccaccgtgcctggcactggtagatgacagtgaacattttatgaatgattgtgggaatgatctgagcagtttctactttaacagagtctctgtgggcttatgagagtctcttccttcyggatctcaaagctttttttgcacagaatctggtaacccttctgtgtgtatatgtgtgtgtgagtgtgttattgcacatatggtttgctttgcagtttggggcagaggctggggatttttggagggctaggatcttgccttagctgtctttgtggtcctcaggagcgctgcacaggtctttccacaaagtggatgtgagttgagtcttagagctggaacgggccctgggaaccatgttacagatgagtggctccagggagaagacctgcgcagatcacatggtgcattagggccatgcctggcagtgcttstgttgccctgggcctgaggtgtcccagttcaggcagctgagttgggtgctgcccaggaggtgaaggctgtctaacagcacaagcgggtttctcttgagaggcctgggatgggcagttgtcaggtaggagctgaagctcacatgtcctctggagcctggggtttctggaggkgtcaggagggatgggcaggggaacaacaaccccaaccctgaacagctccactttaccggcctcagataggcttctttcaaagcctttcactaacttcgaaaaaaagttttgggctgggagcagtggctcacacctggaatcccagccctttaggaggctaaggcgggaggatcagttgagctcaggagttcaagaccagtgtgggcaacaaagggagagaccctgtctctacaaaaatttaaaaattagctgggtgtggtgatgcacacttgtggtcccagctactcgggaggctaaggtaggaggatctcttgagcccaggaggtggaggctgcagtgagctgtgattgtgcccgtgcactccagcctgggcgacagagagaggccccatttcaaaaaaaaaaaaagaagttttgctgttttttaaaaaagttcaagactggttgttaacacccaaaacaggcctcacctgcctactccctcaagcctttcttgggggaggggacggcctgcatggagggargtggggctgtgtttagttgggggtcctgctcttgtggcctggtgggaggctggggatatgawgtgtgggaggacaagaggccctgtctctccctgctccctgtgcagacaccagggccaactcctagaggcagctctgtcaccgttagctcccttccttccagatccacctccttaagcattgccaaatcaaatagctgggatgcctgtgcagcccctgaggcccttccaaacaaccacccccagagggctgggtgcagccaaagcctctgaccatttccgccccctctcctgaggggctgccacctcccatctggaaccttctctgaggaagggggaggggcatggcaccaccagggttggggtcatcgcctctcctccasaaatctggatcctgttaccctcctatagagggagcaaggaggctctgttcactgaggtcttgttttttcacatttttttgtgggtttttgctttatatttcacaggaacttcaaataactcagctagactstacacagaataggacttgttaataagtgctggaaatggaattagatggaaagaggttcattcattgattcatcttagaactgcttcctgagcatcggctagactcccacctacgttctgagcgcttgtgacctaccagtcccctgacactcaggagacgcagtatcttgtgggggtcaggatgggagttccagagccagcccaccacccagctgtgtggcctttggattagatgatgtaatacatatgaagtgtttagaagactgcctggcatatgataagcacttaataaatgttagcagttcttgttcatgtcattcttattaccgtagtgcttgtgctactcctgtaaggtatagttattagccccattttctagatacggaaactgaggttctcagaggttgaataacatgcctaagtcatgcacataagtgcagagccagggttctctctcaggtttggaatctgagccttttggcaacctactggtactgcttatctgggtccaggctaggagctgggtatctagacgtcagcatgaaggagaccacctgctgccttgatgagctcacagcctggcatggaggcagacgtgggcattgccgagtcaatttctggagacaccatgtgggttagaccccagccaggctgtgtgggcggcagggtaggactggccaatggtgtcagctgggccttgtgtcctgggctggaggcagcgctgcttctctgcttgtcagctgcgtgtgtgtccactaggggttggtcttgctgccctggggagttggtaggcatgacggggtctggaacaggcagcaggctgggagtgagaggacctgaaaccactcactggattcctgtcattgcctcagtgtcctcatccgtaaaagaagagtagtcatatttgtcacacagggtcgttacaaggattaagtgaaatgaagcatgtaaaaaaatatcttaccaggcacggtggctcatgcctgtaatcctagcaattcgggaggctgaggcaggaggattgcttgagcccaagaatttgagaccagcttgggcaacacaggcagatctcatctctacaaaaaatctaaaaattgtccaggcgtggtggtatgtgcctgtagtcccagctactttgggaggttgagacgggaggattgcttgagcgcaggaggtcaaggctgcagtgggctatgatcacaccactgcactccagcctggatgacagagcaagaccctgtctcaaaaaaaagacaaaaaactccttataatcataaaactggtatttctacaactagtaagtaattgctaccattttcaagctcctactgtgtgctccacacagcactgcagtcctcactgcagtccctctaggtggatattaggatattattgctcccattttatggatgtggaaactgttccagaggttcagctgttccaggtcacacctgtgagggggtggagttgggagttagacctaggtcctctctgatttttttttttttttttttttttgagatgcaatttcactcttgtcatccaggctggagtgcagtagtgcgatctcggctcactgcaacctccgcctccctagtttaagaaattctcctgcctcagcctcccgagtagctggcattacaggcgcccgccaccacacccagttgattttttgtatttttagtagagatggagtttcaccatgtttaccaggctggtctcgaactcctgacctcaggtgatccacctgcctcggcctcccaaaatgctgggattacaggcatgatccaccacgcccggcctcctctctgattcttaaagccacctctctgtgttccaaagcctctgagttgtcttccctcccagctccgcccctcgctaataagttcctgaagcagctgtggctgttccagggcgggggtcaggctgagagtggtgccccagccaggcccaccacccaggccctgcatctggcggtgggcaggatgcgtcctctacagccagagggatggagggatgggctttacctgcccacagccccgagttatggtggcagcagcaggttcccctcccaaccagtctggcaagccagttttgttggcctgtgagtcacaccagcactgatgagtcaggtttttcccttctttgtgcccagagcagctggggagggagtggggggtttcttaggaaacaggacctccctccctctgctctcccactcatccccttgtcttggagctgctcattttctatctggagggccctggctcagccctggaaaaagaggccttcatgttcccactaaagagagtgtcccatgggccacactgggcaggaaagactgggccccaggctgagtttagtcaggaggcggagggtgaaggggccttccctgttgggaaggagagcagggctgcagtcccaggctgtctgactccgaagcctgtgctcttggccggtcggcttgccctctcctgtctataaagtgggattatcctctgggcagggcagctgggtttccctaagcagagggtcccctgagccacctgcttcttgccttttgaccaccctggctataagggctgtccatatggtcagcctcatgcaggcatagcacaggcatagaaccctcgcagaggcctcattaaacccagccaaagcagccagccagctgggcagcctggttctagatcagcacttctcggccttggccatatgttggaatcacctagagagcttttaaacctctctgctgctcccaaactccagagcaagtaagtcagaatcccagggagcaggctccaggaaccatgtttttggtggaccacactggattgcctctcaagagcctgccctcccagaggtgacagtgaagttgcaagcacagcacaacacccagggaacagtcatgctagagtgcaatgcggaccccgagggtcagaagagacacttggggagagcggggagcgcctggtgggaagagggcttcagtcctgcatcctgaccaggcatggcttgggaaggaaaccagggaggatgctggtctgacagctctggtgagtcatgggccgaggaggaggaagaggaagggatgagtcaggcacagctgcctgcatggcccgagcctggcttgggaggagaatgaatgtgcttctctgttgttccacaaacccagtgttgtggtcctgagccatgccacatgaaggagcgggtgagccttgaaaagatggggttcccaggactcggcatgttaggcatttgtgtgtgcgcttcacacttcgtacagaaattccctggagtattttggcatttctgtaaggcagactgatgagtggcatttgcatttggcagatgtgcttggacagatgaagccccgtgccctggatcacacagcaggtcctgatggaaatggacccaggtcttctgaccccaagttcaccccactgaagacacagacctgaaagacagaaagacagtaacctagagcctgttgctggggtgtggactaaatgaactataaggcttgcaagaattaggaaccacaaccagggtgaaaattatgtaattatgaaaattacggggtcttttctacctccagcccgaacagttgtgggcagatttgctgtggtgtttgctgtggagcagggggctggtgctcagatggagtatgcaggagcccggtggggcctggtgctggatgggccacatctggactgttaagttagttgaaacaaggatgggtgagacggtaaagaatctggagaaaggccaggcacaatggctcatgtctgtaatccgagcactttgagaagccgaggcaggcagatcacctgaggtcaggagttcaagaccagcctggccaacatggtgaaaccccgtctctactaaaaaaatttaaaaaaatacaaaaatagctgggtgtagtggccagcacctgtaatcccagctactcaggaggctgaggcaggagaatctcttgaacctggraggcagaggttgcagtgagccaagttcacgccattgcacttcaacctgggtgacgagagaaactctgtctcaaaaaaaaaaaaaaaggaatctggagaaactgcaggagggaatggagatcttcagcctggagagcagaaaagtgtcagataactccactgaagaggctgtgacttgttctgtgttattccagagagcagagctgatggatttcagatcaaaataataatgttaataataatgacaaaagcgactgcagttggcccttgaacaacgcagggttaggaatgctgacccccatgctgttgaaaatccatgtcaaactttctactcctcaaaaacttagctactaatagcctagttttgaccagaagccttactaataacatgaacagttgattaacacatattttgtatattatgtgtattacatactgtattcttacaataaagtaagctagagaaaaaaaaatgttattaagcaaatcatggccgggggcagtggctcatgcgtgtaatcccaacactttgggagactgaggcgggaggatcacttgcacctaggagtttgaagccagcctgggcaacatagtgagaccctgtctccaaataataaataaataaaatcataaggaagagaaaatatatttactattcattaagttgaagtggatcatcataaaaatctttgtccttgtcttcatgttgagtaggctgaggaggaggaaagggaggggttggtcttgctgtctcagtggcagaggtggaagaaaactcgaacccatgttgttcaagggtcaaccgtatgatgacagtaataagtacytactctccggccaagcatggtggctcacacctgtaattctagcactttgggaggctgaggtgggtggatcacgaggtcaggagatcaagaccatcctggctaacgtggtgaaaccccatctctactaaaaatacaaaaaaaaaaaaattacctgggcatggtggtaggcgcctgtagtcccagctactcaggaggctgaggcaggagaatggcatgaacccaggaggcagagcttgcagtgagttgmgatccgccactgcactccagcctgggcaacgagcgagactccgtctcaaaaaaaaaaaaaaagacctactttctattctctggtaagtatggggctcgtgtgkgtgtgtgtgtgtgtgtgtgtgtgggtgtgtgtgtgtgggtgtgtgtgtgtgtgtgtcttaagcaagagccttgtggggcttggtgctaggacatcgcctgggctgttaggtgatttgttctgtgtaataatatataacacgtatgtgttaggtgatttattaggataatcttcttgattatatttgtgtgtatctttaatccccctaatctcccttagatgtgtggctgggaacactccctgcctcctagaagagactagaatgcttaaggcatttgcccaaggtcacttagcgctttagttaatgatgaagctgatgttcaagcccaagtctgcctgaggacagaacctgtgccttcagcacctgcgtgtctctgttctaggcctgccaggtagctcagtaaagggtaactataattactattaacttccttttctttttttgagacagagtctcactgttgcccagtctggagtgcagcggcgcaatctcagctcactgcaaccttagccccaaaagtagctgggactacaggcatgtgccaccatgcctggctaatttttgtatttttagtagagatggggtttcaccatgtttgccaggctggtctcaaactcctgatctcaagagatccacccaccttagcctcccaaagtgttgggattacaggcgtgagccaccacacccagccaccattaactttctaaccattagcttcatccaacagtggaataggcttctttgtggcatggtgaacacctcagttcaggaggtgcacagaggctgaattgccccccagctggggtgactgtggggtagttggtgagtctccatcactgagctccaagccagccatgctgaattagagtcttgagctggtgcctaggtgtgtgtttctgtcaggccacaggagggccaggcatggtggctcacacctgtagtcccagcactttgggaggctgaagtgggcggatcacttgagctcaggagttcgagaccagcctggccaacatagtgcaacctcatctctactgaaaatcaaaaaaattagccgaatgtcgtggtgcacacctgtagtcccagctactggggaagctgaggtgggaggattatttgagtccaggagatggaggctgcagtgagcctgatcacccactgcgctccagcctgggtgaccgagtgtgaccctgtctcagaaaaaaaaaaaaaaaaaagctgacagaagaccagggcacgcagtcaggtgtggatagcactggcccagctgtcctgggagggctcagctcttagattctgttcctctctagtgggcaatgggaggttggtagctcctcccgccttgctcctgccgygtgttttccttgctgcttttcccattggcatattcttcagagctgtgcattcagctcctgatattttcatattctagttataattcagcttccactggtggtggagtagtttggcagaaagaatttactgtgccccactgccacctcacacacacactctctctctctctctctgtctgtctctgtctccgtctctctctcgggaaacagctgtcgggtctgggacaagtcacgtcacctttcagccttggtttccttgtctgtaaaataaagtggctagggcagaagactttaaggtcgctcccagcttcaggactctgccatactcgggggacatgcccccttggagtggtgcatgtctgagcgctcgtggcagttgacacccagtgggacagagtcccagtgtcagaagtcaggctgtgccgttcgcttctaggcacctggctgccgtgccggtgcccgttgggtcctcatctttaccagcagtgagggaggttggactgctatgtccagcagtaaaaagcacagtggctgagaaaacctacctccccttcctggagtcctgaggtagcaaagggagccagccagatacaggagacctttctagcaacctctggggagttcctgttttatttattagccaccatcctccctcttctgccccaggaaaagtgctgaccctacgctgtgcaaccagcacaaggaggcagacatccatcaagcccactctctgtccctgttgagcttgacctcatttaacccctgcgttctgctgcaccgcgaaataaagaccaagacatccctatggcaggagttttcttttcttttctttttttttgaaacagagtcttgctctgttgcccaggctggagtgcagtggcgtgatcttggctcactgcaacctccacctcctgggttcaagcgattctcttgcctcagcctcctgagtaactgggactacaggcatatgccaccacgcctggctaatttttgtgtttttagtggagatggggtttcaccatgttggccaggctggttttgaactcctgacctcagttgatccacctgccttggcctcccaagtgctgggatcacaggcatgagccatcacgcccagcctcgcagttttcatttttcaaaatcacagcaactttatggaaaaaaaaaaaaagtaacctttaattgtgtaatggttaaagcattactgactcggcttggttaccaatgacaatagctactgtcttttcagcactgggcagagtggtctcacttaatccttacagcagtcccatgaggtgggagttacatgctctttttacagatggaaacaccaaagcttaggttggtgaggtcatccacccgtggtcacaaaggtggttagcagccaaagaaaacccccactgtccatctctgaagcccacatgtgagtagccagattgcagagagaggctacagtgtctttttacacatacataattatccatgatccaggttgccagaaagcacatgtaatcagggttccctccagagctgctaacgctggaactgctcgtattcaagccaggactctggctgcacttgagagcaaacacatcagtacgtggcaaagatgagagtgtgttgactgcaggaaagggacataggtgcttaaaacaagggaagtgcggtaattcccacctatgtcttactctgcttgtgaagtatagtattctctccaaagcagcctcagaaaacatgttagttgcatggcaggatagaaccctagagtcaggctgggcgcagtggctcacgcctataatcccagcactttgaaaggccaaggcaggcggatcacttgaggccaggagttcaagaccagcctggcccatctctactaaaaatacaaaaactagccatggtggcacacgcctgtaatcccagctacttgggaggctggggcaggaaaatcacttgaacccaggaggtggaggttgcagtgagctgagattgcgtcactgtactctggtctgggcaacagagcaagactccgtctcaaaaaaagactaaacgaaaaccctagagttagatcctgaagatttgggggctctgtttgtaattgatatcagataggccagttttcctctggaaatgggtcgggggatggctggtcagtgcccagctctgggagaccacccttccccgagcccggccagatgtggccagggcccccaggctggactcacggaccagagagcagaaaaaggcctgctctccctgagcccagccaggcagccgaccccgtgaatgtgtacgttgtatgcagcaccatgaaagcacaccctgtctcacgcatgtgtgcccccttgtccgtatctgtggctgcccgcacactgaggccttgggtaggtctgtttctcttggctgcaattttgtctctctcatgrccacagaggatccgggcctgcctcctycagcaggtttcctcactgtacacctacctcagtgactggttttgtccctcctggactcccacctccacccactccctttctttctgcctcttcctattcagtgaggcttgttcacaaaacatagtcctctgttccccctttgcaggggtttcttgcagacagctctgtctactctcccatctgatctgtgcctcccctctccagctcctccttcttttcctaaactgcctgcccatttcactcgcccgtgcagcatgccaggcattaactctgtctgtaggatcaaaaagatgaactggaggatgtcccagcctcaggcagacaaacaagatcattgcagagaatttctgttgccatgggctgggcatcatcctagagccgagaagggggctctcaggggtgccaccctgccttgatccttcagctctgctcaggaccacctgggacccactgtacctctagagatgcccggtaagaagcctggcccatcacttagcaactggctccacccctttccctccctgagctggggcccgagaggaggaaaggcccacaggcctgtaaagaggccaccaaatcccagagcatgggaggccccagctgaccagagctgggccagcactttcccttcaaaagttacctaggctctgagggtcatctctgctaagtctaactataaatatcgcgcttcctgaagggattacctgggcaccacaccccctggctcccccctccccgcctgggctgatccttcttctgggccctgtgttcttcctgaccccttgttcccgctgccaggtgggacacttcagactacctgtgtttcagctgtgactgctggggtgggaggagagaaacaagagattcgagtctgtatcctggccagagggcccttgccggccagctgttgggacaaggaggctcttgttcctgccttctcccgtctggtgtgagagccgtgtctctcacaccagccagagcaagcccagacttgtcacataatcggtrcatctgggaaggacactgttggccccatccctggagtaagggcctggggacagaacttggtaaccgagtgtggaacagcttggggattgccgcaggtataaatagggctgtttcctggcttgggtggcctgactggggaaatctctgctccctttggctggtctcagatttggtgtcacatcccagtggctcacttattccagtccctgaagtcacaagaaccatctcctggggtctgagatcaagaattgaaggaggggccagcccgctgcagacctctcccctgcctccgcctgcctccctgctgctgcaggagctgtaactcctccacccctccccacctgctcacggcgcctcggtcagttcctttctcaattcagcaggtacttgctgagaaccgcgctgggccaggcactgtgtgaggcagtgggatctattcagctagggtctgccatccttccttgtgtttttggaatctcctcttctgtgtagccatcctgagttcagcagtgtgaattgagtggtgggagtaaacacacacacacgcatacacactcacactcatagatgcacaccagctctgggcaacttggagaggaccttaaatgctctgtctcccactctcctttcggtgccctcccttggggtgatatcaccagacaccattcattattgaggccaaaccacagcatccaccatcattatcctcctccagcccagacgtagtgccctcttgctctcttccctcccaaatcagctctcagcagcacctctggagaccatgtgttgaactgtttgttaagatgtggctgggcatgccatttccactcctgttttgctgtgtttacaaataggttcttaagtcagatcaagtacataccccagcccagcccctgtaactggttccatgggtgtgaggtaggccctgagaatctgtcttttgaaccagcaccccaggagatcctaatacgggaggtttcgacaactctttgggaccctagcctttgcctctatacacagacayatacattctctgctcaatcacaaatgttggccaggcatggtggctcacacctgtaatcctagcacttcgggaggccgagacaggaggatcccttgagcccaggagttcgagaccagcctgggcaacatagggagacctctctattaaaaaaaaaaaaaaagtttaaacaaaaaatgtcttttggtgtcctctgcccagcacaattgcggaaacgcatgctttttgtgggtgtgttgctctgctgcctccccgtgcaggttgtatgcctttgtcagcttcattaaggacaggaaccatttctgttactctgtctttgacctgaagcttatctaggacaggagatgtaagtagaagctactaaatgctcctgctgctgaaaccagcagagcctgcctggccctggacaaagcctccaggagctgtcagtaactgatatcctacagggtatgggcttagcaagtcagcaccaccgtcggctccccaaactcttcccacttttccatggctgcaccccagaactccaagtatcctctttccttattaacaacttttatggtattattcttattattaaagtaatacattcttattgtagaaaacttggaaaatataaaccaagaagaaatcatcggtaactgccaatgaagtataaccactgtttacattttgatataaattcttccagccttttttctcttttaaagaccaggtcttactctgtcgcccagtctggagtatagtggcgtaatcatagctcatcactgcagccttgaccttctgggctcaagttatcctcccgcctcagtctcccaaagtgcgggggttataggtgcgagccactgtgctcagccctcctgtctttttaatatatataattatacagctgagcactttgggaggcagaagaaggaggatcacttgaagacaggaggagtttgagaccagcctgggcaacatggcgagaccccatctctaaaaaaaaaaaaaattttttttaaattatccagtcatggtggtacatgcctataatcacagctcctcaggaggcggaggtgggagcatcgcttgagcccaggaggttgaggctgcagtgagctatgatcacatggcctgagtgatagagccagaccccgtctaaaaacaaacaaaaaataataattatacacccttttttttttttttttttttttgaaacacagtctcgttctgtgacccaggctggagtgcagtggtgcaatcttggctcactgcaacctccgcctcctcagttcaagcaattctcctgcctcaagctcccaagtagttgggactgcaggcgcgcaccaccaagcctggctaatttttgtatttttgtatttttgtagagatgggtttttaccatgttgtcccagctggtcttgaactcctcacctcaagtgatctgcctgcctcagcctcccaaagttctgggattacaggggtgaaccaccacacctggccaatacatactttttttgaatcaaaagctggagcactgtgcgcttgctgtttgagaccttttttcactgtatggtggacgttttcccgtgttagcatcctacctcaccatcacagagtggctgccgctgatgcctcgagtggatgcccatattttatgtagcctttctcctggccatgtgcattaggttgttcctagctttaacctgttaaaaaggtgctgagttaaacagctttgtagataagtcttcaccacacacttgtgattattttcttcgaataaattattagaaccaaataggtgagccaaagagatggacatttttaagtttctcagtacctcgcggaggcgtgcaccaatttgtgcagcatatgaatgttcacactttccactgcccaacttttttgactccatacagtatctttttgtttttgttttccatttttctgagatggagtttcactcctgttgcccaggctggagtgcaatggcatgatctcagctcactgcaacctccatctcccgggttcaggcagttctcctgcctcagcctcctgagtagctgggattacaggcatgtgccaccatgcccggctaatttttgtatttttagtagagatgaggtttcaccatgttggtcaggctttctcgaactcctgacctcaggtgatccacctgcctcagcctccaaaagtgctgggattacaggcgtgagccaccgcggccagccaatatctttttaagtaaatgaaattaatatgttcatcatcgacttgtctatatgcttagatgaaaaacttccttttctgtgtttgtctgtatcagtggctaagattgtaagcacccgtgtatagggctgcaaatgtttgggcatgtctcctatacacacttacctctgggcctggagaacttggtgagttgtttttgtacagcgtttgacccactgatgaagagagccaacaccagcccagaggtgctgcsgctgccctctgctggctctgaggtgcagtgatgactgggaaggcaacggttggactcctgggctcagcttacattaaccctgcctgccccctccccctcaccagcccattgtaagattttcagccacagaggccctacctggagggtgaggagtttgtcaccgctgtatcctgggtcactgcattaattaggcgctgttaatacttgcagaggctcactcacagtaactgtcagtgggagagaagcatagaagtgactgctagcaaagctggctgctgttgtgtagcggggaggggaccctgaaggctactctgggggagcttgagaggtttgcaagccaaggcagcatccttcaggcacgtgtgtggcctcctgaggtgatgactttgaaaggggccaccatggagctgtgtttattttaaaggtcagttctttagtcttctcaagagaaaatgagatgcatggacacagttacagctcaggtgtccttgtagtcacagtccagcaacctcacttgttgggcatagagcccaaaagtgaacattttatttttttgtttgttttcgttttttttttttttttctgagatggagtctcactcttgtcacccaggctggagtacagtgacatgatctcagctcactgctacctccgtctctggggttcaagtgattctcctgcctcacctccataatagctgggattacaggtgcccaccaccactcccagataatttttgtatttttagtagatatggtgtttttccatgttgaccaggctggtctcgaactcctggactcaagcgatccacctgcctcggcctcccaaagttctgggattacctgcgtgagccactgtgcctgaccatttatttatttatttatttatgagacagggtctcactgtgtcacccaggctggggtgcagtggtgcagtcatagttcactgcagccttgacctcctgggctcaagtgaccctcccatctcagcctcccgagtagctgggactacaggtgcatgccaccacacctggctaattttttttattttttgtagagacgagtggtcttgctttgttgcccaggctgatcgtgacctcctggccttaagtgatccttccacctcagcttcccaaagtgctgggattataggtgtcagccaccatgctggccaaacagtgaacatttttaaatgtcacaaagcctggtctctttcttctgtgggaagcctcttttgtagacagtgctgacagcttggtcgtgccctttctcaacccttggtagattaggagtggtccatgagctgggcctgccctctccccatgttaggagcagcagacagacgagaccagtaagaagtgcaatctggcaaagaggaaggaggcagggaaactgtagaatcagctcaagaatttaaaatgccattgaagctaaacagctgtttagggaagaggcagaagtcccatacccaaggatccctgagggagtcactgtataatgattgtgactcctggtggatcaaagctctcattagggggtcatccctgctaaataatgaaagagaaaaggagtccagaaatcatgaaatggagcaacttccttggtcaaggcataaacacctccaggctaaacttcataaaaaatatctagatgaaattgtaaccttcagtttcttcagtgtctcctttctgtccctcatatttaagcctttgattaacctggttttgatttttgtggctcacgtgaggtggggattggagttcatgtttccatcatagtcccagtgtagcaggacgagccacagacaaaacctctcagacaccgagttgtagaaggaagggctttattcagctgggagcatcggcaagctactgccttaaaatccgagctccccaaatgcacaatttctatcccttttaagggctcacaacactaaagatttcacatgaaagggttgtgattgatttgagcaagcaggtggtacgtgacaggggctgcatgcaccggtggtcagagagaaacagaacagggcagggagtttcgcagtgttcttctatacaatgtctggaatctatgaatgacatcggtttctaagttatgagttgagttttaactgctgggtttaggccaggcaggccaggcgtggtttcgggcctggcgctgggctgcctgtctttggttttacttccttgttgttttttcttaaaatgggtactgagtataaaaccatataaaacaatatgagagggtctctctcttccctcatttcccccctttgagactctcactttttattagtgggagttctcactcttatttttgctacttatgtctttttgtgcaatagattgatagtgatttatatagtatgcttgtgctgaagcattttggtgaactaaggtagtgacgaagttttttatcatttggagaaatacaggtatcagacaagggagcagtaagcaggttcctattactattattactcttattataagagttttaaattcttctattgctgggaaccaatttccaaacatggctcccagattgagtccatgccacacttgcatgggggcatgtgccagttttgttatatctttaactatatcctcaactacttgcctgtgaccatctatgtgtagacaacaattagtaaggttaaatttttcacaaacaccttcttcagctgctagcaagtactcaagagctagtctattttgatagatagcatttctcatcagagtctcttgccaggcaagaacagtcaagtcttgaccggttttattagtaataatttctaaaacagcttgtaactgtgtgattcggttgagcatgtagatgggggttcaatatccccatgagccatcttgtgccaaagtggctggtccatagtattatatgattttttcagggggccatttatcatctttccaatcacctatggctatgcttcgtttttcgcgggaagcatagactgggaagcccagaagtttacctgtttttatgggcagtaagaagaaagatgacttaatggtgccaattacacagctacctgtccactgatcaggcagcttagcataagctctgtgtccacatatccagtataacctggcgggggccgtccagtcccagtggaattctgggtgggcccaaacagtctgcaactttggaaatttactgaatggatttctttctgtgtaattggaactccaccatgtaactgtttttgtggtaccattttacagcttttgcccaagacaactaagccgccctacaggatgagtgaatccttttccttctctagctatgcaatactgtccaatawttgagacttttagaacccaaaaattgtcagggtggttctttggggctaagaattcatcaggaactgggtctgtaggaactaagtgtcggacttcccatggccattgatctcctgttacggttccaacacaaayataacatgaggtgacttgtagagactgggctacatgtttggctaattgcaaaaataaatttttagtttttcctggaatctcaagtactggcacatttagttcatcatagaaagtctgaaatactgtttctggagagcgtttttgaacctctctttttattaggatgcttacactaggatctagtccttttccatcaatgcctaatgttgcatgttttttttttaattccactttgggtctgaggggtttgtgattatcaattctaaaaggttgcagctcccactcgtgcaggaggggctgacttttcctttttggagctaaacaggatcttttttatcttcttttcaagtagcccaaatgacacaagaccagtactgacacatctcacataaatatgattcttgacagatatacttatttttttttactgtgtaacttttttttccaatttagagaaccgcatcctattctatgctgcttactatcaatagtggcrcaagcatcaaattttaaggttacatttttgggacccctctttcttctgttctagctgttaccttacttgtgtcacctagaaaaggaccagtccttaattktattttaaaaactgtgatcatgggaggcttaaaatgggtcataacacacatcaggttggttatttcctgggctacataccttggatagaatagcattatacaaacaagtttcttttagagtcctggtacacttataataatcataaaataataggactgtggcaatcttttgtcttacctcagtgacttgatatatatactggaaacagttctcagtctgagaaaggtcagttgaagtccttactgtacaagtctaaattttaaggaaaatgagtcctgtgatgagtttcctcatgcttcggccgtgcatggaccagtcagcttctgggtgtgactggagcagggcttgtcgtcttcttcagagtcactttgcaggggttggcgaagctgctcccatccacgtacagctcccagtctactgatgtttaagggtggtcttggtggttgggcctactagaataaactgaatccaatacttctacacagttatgtttaactgggctctctgataccaggagtaaggtggcggggttagggtgttgcaaacttcaatggttatgcggggatcttcacagagcaagctttggtatctagttagtctagcattcgttagctaatgatgtcctttggtatttattaaagtcaccacagcctgggcatactttaggttttgcttaagagttagcttatctgcttcttgtgctaacagggccgttgctaccagggcctttggacgtgggggcagcctttggaaaccccatctagttgttttgagagatagrccactgcccttggccaggaccctacagtctgggttaaaactccaactgccattttttctctttctgacacatagagtgtaaagagttttgtcaagtcaggtagcctcagggctggggccgacatgaatttttttttttttttaactcatgaaaagctcttgctgttgggtgtaatagatgtagtttatctaatttacatttttattgactgtcatttaccaaaatactgacttaaatcttttaactatttgattttaagctttaaattgatctggtattccttgcggggcttcgattgcatctaaatagatgtgagagttgaaagacctataaggggcttctctcgttttacgatgtcttattattttttttcttcctctggttgatgaaatgccagggtgaaagggatagccaaatggactaaagcacaagtgccactctagttattcagcagagtgcccagtaaaggtccaccacaataccaccacgcatccgctcggggatgaacaagggctgactgattgataagctcttgaaaattcttaagcttgctgcatcccttcaggtctccacggaatgctaagtctcctccctgccrtgagagacacgaagtgaacttagtgttgggagacggaagctggatggccctcgggggctgacccacagggacttcgggatatagcagagagagcttggcatgacttattactccaggctgtagaattctggaaaagagctaccatgcagcccacgcctggtcgactggaggaccaccttagtgggagggggacaatcagggtctctggcctgccatgtgcacaagcataacaattgcatttgtttaaagtgcagatggaatatttgatccatttcaaccaggcatttgcatcttggtgtgctgtcttaattgccaaagtttgttttaagtctaacttttatgatcstctagtaaaatgaatgtttcctttagcaccaatttttactagtttttagaccaaagaaaactmaacaccattttatatttaataatatttcttgtatgatttttataccagagaagctaaattttacctttatattastgtgttattaatattaaacttaattttaataaaaccttgtagacatatttatccaatttttcatgtttgaccataaggtaagattttatagactctttttaaccttttataatttttgtaaaagagcaggttgatgcttaaagaaaaacctgttgcatttttactttaatgtccagttcaccgaaaaactggatgatacctttttaactttagctaatatgtttacacacagaattttctttataattaacgttttaaaacttgcttaaacttttaaaacattaatttttttaatcttttaatgtagataaaaatccacatttttatgcccctttataatctttttaccaaaagtatattttacttttctcatacaccttgcacataaactgttttttttaatagtcttcaggaggccttattacttttaaattatacaacattttttgcataaattttttataacattttttctttcatgactttcaccagcaattctttaacatgtttcaactttttgacttgttacaaacattttttttttctttaaacaaccacttaatttatttcaggacaagaatttaccatataacactctttacataaattctgcctcaccctttttttgaagataaccattcctttttttaaagcaaactttctttatgtctttggactagactgtctaaggccacaagattagaagttaccataatacatgttacactgttaacttttagcaaacttcagttttgttgaaaaccttgtaagtttgggatttcaatcatcctttgctattaataagaccttgtttagtctaaattaacttagaattggtatagatggcctttttttctctctgctggtctttacttgcctctgccagctgcttatgctgctgttattttaactactgtggaggggaagggggtctaaaaccagctgtaactatgtatggaaactggtctgggtgccttggcttacaggttaccttgtgtcatacctttgaaacaagggacctgtccaggcttccttctgatcgccaacccacctctaatgctggccagtctatttcacacaaagttctaagttttcctggtgtcacagtagcactgtaatctcccttaaattcttccttgaaattttttttttaacatagttcctagtagggtgggcttatttgttcctggcccatgcttctttgagacaaaacaccacgcttacaccacacacaccccacaaaacaaaaaacaggtaaaaagggcacacacacacttttgcagtttacaccaaaccaaaatcagagtatccagaaatccaagccaggtcaaaaccaaaaccaaaaccaaagtatcacacaatctaagtcaagtcaaaaccagaacaaaagtaccaatgcaggcacgtcgtgggtgatcaggccacacttccactcagatggagtggggcaagttccaaagactagtcttaccaagtttcagatgtccggactccaagtaccggttccttcctggtgttcagccactgtgttaatcctccgtgggggcctgctacgtgctgctctggtgaggcgttccaccgggtcaatttcctacccgggagcgctctttggattgcatcactcaggctggccggagttccccacagggatgctccacagggcaggtctaagccgtctgaggggctgcctcagccgtccgtgagttacctcgtttcctggtcagggaaccaagaaatgtagcaggatgagccacagacaaaacctctcagacaccgagttgtagaaggaagggctttattcagctgggagcatctgcaagctactgccttaaaatccgagctccctgaatgcacaatttctgtcccttttaagggctcacaacactaaagatttcacatgaaagggtcgtgattgatttgagcaagcaggcggtatgtgacaggggatgcatgcaccggtggtcagagagaaagagaacagggcagagagtttcacgatgttcttctatacaatgtctggaatctatgaataacatcagtttctaagttatgagttgatttttaactactggttttaggccaggcaggcccaggtctggttttgggcctggcgccgggctgcctgtctttggttttacttccttgttgttttttcttaaaatgggtactgagtataaaacaatataaaacaatatgagagggtctctctcttccctcacgagcatcatttgtcacacatagtcatcttcccctcccacctgcaagaggaatgttccttctcaccacgagcaagttcctgtacacacctggatctgtttctggactctctgttctcatttgtcttgtataccaaaaataaaattctaagtcctccaaccagttgaacggacccctcttctcagccaaggggattccaaagaaatctgaaaaacgagttcaggccatgatgggagggggagtcaggcctcattatactctcctcccttcggactgtgtcttcaggcacagctgaccagcattaacattaaaacggtccaggcgtggtggctcacgtctgtaatcctagcactttgggaggctgaggcgggtggatcacctgaggtcatgagttcgagaccaacctggcaacatggtgaaaccccgtttctactacagatacaaaaattagcgaggtgtggtgttacacatctgtaatcccagctactcggtgtcacgcgcatccatgtgaagagaccaccaaacaggctttgtgtgagcaataaagctttttaatcacctgggtgcaggcggcctgggtctgaaaagagagtcagcaaagggtggtggcattatcgttagttcttgtaggtttgggataggtggtggagttaggagcaattttttgtgggcagggggtggatcttacaaagtacattctcaagggaggggagaatattacaaagtaccttcttaagggcaggggaggatattacaaaataccttctcaagggtggggagggtgtatcgtacaaagtaattcacaagggcgggggaatatcacaaagtacattattgcaagggcggggaggctgtattgtcacaaagtcaattgatcagttaggggcaggaacaaatcacaatggtggaatgtcatcagttaaggcaggaactgggctattttcacttcttttgtagatcttcagttccttcaggccatctggatgtatatatgtaggtcacaggacatatgatggcttagcttgggctcagaggcctgacattcctgtcttcttatattaataagaaaaacaaaacaaaatggtggtgaaatgttggggcagcgaaaattttggggggtggtatggagagataatgggcgatgtttctcatggctgcttcgggcgggattaggggcggcgtgggaacctatagtgggagagattaaactgaagaaagatttgggggtaaagggtaatattgtggggttgttagaaggagcatttgtcgtatagaatgattagtgatggcctggatgtggttttgtatgaattgagaaactaaacggaagacacaaggtccaaataaaagaaggagaaaaacaggtattaaaggastaagtattgggagaacccaggacatccaattagagagtgtccaagggggttcagcgtaattatttgcttggttggcgagtttttgggctctatccttgagttttttatgttgtcatataccaagccagattgatttgggtaaaaacactcttcatttaaaaatatacagagttctcctttttcagcaatgagtaaatcgaggcctcgtcagttttggaggaaagagaaatgcaaagccagtaattgtttgttaaagaaggattagaaatggctaggagagagtgagtagattgatagtgtggtggagataggtagggagaggtagagagtgactggagaatgggggcaagtataagagtgagtagaaaagtgaaaaaagggacttcatcagagtgaaagtattggagggtaccccgtcagcaaagatcatctatccactccaagagggagtcaagagtggcggattaggggtagtactaggagatatctgctatgatagtttggaggaaaagtgtaaactggcagggcatttatgagtagttaaaaatggtgaatggggtatgactagacagaagataggagggatgacaagttttcggggtgcagtccgagtgggtggggggtgactgaataaagcctgttgtaaagatagggtaaggaagaatagacctaataaaaatgaaaggatgtattaggcttataaggattactgttatcctttaggaatgcaggtgagtttaagggaagtagggtgagtacttgtgacttccaggaggaagaggagagatcaggctggctgtccgacggacacggctttattctggaacggtgaacccaatggggagggtcctgcaggcggatggcagttggggtactatagatgactaagtagggtccggtccatcgaggttgtagagtttgaggggtcagattcttaacaagaactgatcgtccagctagggtgtcttcatatggctgggaatctgaagtaggcaagagaagattagcagcctggcgagtttcctgtctagcctgctggaggactggaagatagtcgcctagagggctggtgtctgggacaaggttggggccgagcaagaaagtgcgtccatataaaagttcaaatggactgtaccttcaaatggactgtgacatatttcgaaatggccctgcaaaactgtctcttatgggggaagtttacattttctttacagaatcccgttccctttccaggtctttttctgatcctgaagagattagctaaaaatctagcacctgttaaaggtctgaataggaaacatttgccatctattgcctctaagggcagccacctgtgaaatttcatctacataataagaaccttggtctccacaactccttattattattttttttttgaaatggagtttcactctttgttacccaggctggagtgcagtggcacgatctcagctcactgcaacctcagcctcccaagttcaagtgattctcctgcctcagcctcctgagtagctgggattacaggtgcctgctgccacgcccagctaatttttgtatttttagtagagatgggatttcacagtgttggcccagctggtctcgaactcctgacctcaggtgatctgcccaccttggcctcccaaagtgttgggattacaggcatgagccaccacccccagcccacaactccttatcttaacccagacattcctttctgttgattcgaggacttaagataataactctttcaaccaattgccaaccagaacatctttaaatccacctatgacctttaagtccccgccccttcaagttgtcgctcctttccacacaaaccaatgtatatctcacatgtaatgattgatgtcttaaatctccctaaaacatataaaaccaagctgtaatccaactaccttgggcacatgttctcagaacctcttgagactgcatcacaagtcatggccctcacatttggctcagaataaatctcttcaaatattttacggggtttggctttttttgtccaacagtctgtccctgttccagtactgtgccaactgtagctttataattaatgctgatcatggcagcacaacttctcccacctgattcttttctaggagcatctttgttcttctatataaaatttagaatcagtttgccaggttccttgggaaaaaactgacaggaattatattggaattgtattacatttatagatcagtttagggggagtggacatctccatgatttctttgaatgttgcttccttcccattttccctattgtatacttctggaaattcagttcaaaattttagacctagcagggcatagtgtcacctatatagtcccagctgcttgggaggctgctgggggagaataccttgagcccaggagtttgaggctgcagtgagctatgatcacaccaccgcactccagactgggcgacagagtgaccttgtctctcaaacagaaaaaagacatccgaatctcaattatattgtatttttctttatttttattttctttttatttttttgagacagggtctcactttgtcacccaggctggatttggagtgcagtggcatgatcatggctcactgcagcctcaacctttctgggctcaggtgatcctcccacctcagcctcctaaataactgggactacagctgcatgccaccatgcccgactaattttttgtattttttgtagagacaggtttttgccatattgcccaggctgatctcgaattcctgggctcaagtgatccatctgccttgacctcccaaagtgctgggactacaggtgtgagccactaggcctggcctgtatttttaatttttagaagttctatatggttcttttaagatcttcttggttatacctactatgtacccacaaaaattaaacatttttaaaaaatctccttggtcattctttataatctcttattcatatttttaaggccctcatcccttaactcagtatttcataatctatccaaagtctttgcaaatctgattcttttgtctgctgtttttgccagtaaagctcgtactgccttgtttccttgcatattgagattttttttttttttttaaaaactattaccttatttatttttcttggaactttatcttgggaattctttgaggcctggtttgaagttgttttcctccaaagagggtttgcctttccttctgccacctcaccaccccaggaacactttaaattaaatatttggctttagagttttctgcccctacaggtaactgtgaattcagatggtgaactacaggatttagtcagacctgaggtggaaccctcactcacttactatgtgacctggggcaagtcatttaatctctctaaatctgtcatatcacctgtgaaatagcaataataatacctactgcctaaggctactgcaagaatgaaatgggatcatgtatataaataaaggcttgcctggggttctttctcagcggagatcgctgcctgcaattctcttccttgcttccttttgccccagccagtgggagcagcctggtggtggcccccagcctcagttcttccactcactgtaggacctgagttatagtggaagcagagtgcttsacatctcactcctgtggctcactctgcctttagttttgagatgactgagcctccaaaagcctttgagagatacctctgccctcagtcttggctgtggtttggagttgtcttggaggtcacttggagctgggtaacaagaaaaatgacatttgacagaattgttttctttgtcagatgctgcaggaatttttgggggagtttgttggtcatgattgcttaaaaaatcctttttttaagtgggacattagtaacaagatgttaaaattgttaataattttttttttgagacatggtttcgctgtgttgcccaggatggagtgcagtggcatgaccacagctcactgcagcctcaacctcccaggctcaagtgattctcccatctcagcctcccaagtagctggaactagaggagcgtgccatcatgcctggctaatttttaaaatttttttgtagaaacagggttttaccatgttgccctgggtggtctagaactgccgggctcaagcgatcctactgcctcccaaagtgctgggattacaggcgtgagccaccgcgccctgccccacatcatgtgggaagggtgcggtggctcacgcctgtaatcccagtacttcgggaggctgaggcgggtggatcacgaggtcaggagtttgagaccagcctgactaacatggtgaaaccccatctctactaaaaatacaaaaattaatcaggcgtggtggtgggcgcctgtaatcccagctactcgggaggctgaggcaggagagtcgcttgaacccgggaggcggaggttgcagtgagccgaggtcatgccattgcactccagcctgggcaacaagagtgaaactccatctcaaaaacaaaaaacaaaaaacaaaaacaatggtagcgtatgctttgctgacacaattattttatgtccctaggttggttatgtgaagttttctgactcttccctgctatttaggaagggcttcaaagacctgaatacttagtagccagtgcagcagggtttcagggtctggcctggggaggggaggggagggggagggcaggttgcagctcaagtggctttagagatgctgagcctctccttctgtcctgcccaggacgcaatgagcccctgaagaaagagcggcttaagtggaagagcgactaccccatgactgacgggcagctgcggagcaaacgggatgagttctgggacacagcgcctgccttcgagggccgcaaggagatctgggatgccctcaaggctgccgcctatgctgctgaagccaacgaccacgagctggcccaggccatcctggatggagccagcatcaccctgcctcatggtaagtgggcagggccagggctttatccccgctggagctagggggtcaccagcacagtttgagggtgttgaggagtgtggagcggtggggcaggtggttactcacgtattcattcattcaagcaccccttactgagcatggaccaggagtgggtacacaaagaaaaagagacacagtctatgcttgcctaatgacatgacagaaagacaacaaacctgcaaagcagtgtcacaaatgcactttgggaccccagaacatccaaggcactgacctttttattttatttttttttttgagatggagtcttacttgctctgttggctaggctgaggctcagtggtgggatctcggctcactgcatccttcacctcctgagttcaagcaattctcctgcytcagcmtcctgagtagctgggattacaggcatgtgccaccatgcctggctaattttcgtatttttagtagagacggggtttcaccatgttggccaggctggtctcaaactcctaagctccagtgatccactggcctcagcctcccaaaggcactgaccttttattgggttgttatgtgctggacaccgaactagaaacttccactgcattagctcacgtaagttcatagcagtcttatggggccatgtaaagcagagggtgacagtggagccctagaatcacagacttgagtttctttttttttgagacggagtttccctcttgttgcccaggctggaatgcartggagcgatctcggctcaccgcaacctgcgccgcctgggttcaagtgattctcctgtctcagcctcctgagtagctgggattacaggcatgcgccatcacgcccagctaattttgtatttttagtagagacagggtttctccatgttggtcaggctggtctcaaacttccaactgcaggtgatccgcccgccttggcctcccgaagtgctgggattacaggcgtgagccactgcgcctggccacagacctgggtttcaatctgaatgtttccctttcctaactgtcttggctttagcaaggagcttctcgaatttagagcctgactgccttacgactgtaaaggggagatgattattaggattcagtaagatacacataacatcatttagtccagtcccagcacttagtaggtgctcaagagacaataaacatatttctccatgcattacgttttgccagtaaggacactaaggcccatggagagcagagctgtgctatttcattcatccctgtaaccccagcacctggcacatgtgaagaagtgaaaaataatatgccaggatgaacaagccagtacctggtggagctgggatgccagctcaggtcttcctgactccagccctgtacacctggtcatcaggctgtcctagggagatctgactgtggggtggccatggcaggtgtattagtctgctcaggctcctgtaacaaaataccacatgctgggtgacttaatcaagagacatttattttccacagttctggaggctgggaaatccggcatcatggtgctggccggttcaggttttggtgaggactctgttgctggcttgcaggtgtccgtcttcttgctgtgtcctcacatggggagcgagtggagagtgagatagtgctctagtgtctctacaagaactgtaagccagggcagtggagcacacctgtagtctcagctgctcgggaggctgaggtgggaggattgcatgagcccaggagttcgagactagcctaggcaacatagggagatcttgtctcaaaagaaaaaaaaaaaaaggaccatttttcccatcaaggggtcagaaggtcagggccccacgctatgacctcatttaactttatttatttctgtataggccccatgtccaaatacagtcacattgggggttagagtttcaccatatgaatttggggggacccaaacatttaatccatgatagtggatccccaagctgactctgacagccctgcctctcctacaggcaccctctgtgaatgctacgatgagctgggcaatcgctaccagctgcccatctactgcctgtcaccgccggtgaacctgctgctggagcacacggaggaggagagcctggagccccccgagcctccacccagcgtgcgccgtgagttcccgctgaaggtgcgcctgtccacgggcaaggacgtgaggctcagcgccagcctgcccgacacagtggggcagctcaagaggcagctgcacgcccaggagggcatcgagccatcgtggcagcggtggttcttctccgggaagctgctcacagaccgcacacggctccaggagaccaagatccagaaagattttgtcatccaggtcatcatcaaccagcccccaccaccccaggactgatgggcccacggacccctgggaagaggccccgcctggagcactaggcccccaccctgctgctgccttccagtgctgtcattttcttcaggggccctcccctcggtgtggctggtgggtgagccgtgaagggaccctgcctttcagggcactacgcgccaccagttcccggtacccagggagcaggcagccacacacgggccttgcaaccttgtcaragaaaaggcgaacagggccctcaccctgcctgtctcccgaagcaggttcgagccacaagggccaaccaggaggcccctggagcccagatctgtcatctggtgctgccagctgtgctcactctggttttctgctcagggtctgaagcagctgctgtctccctcctctgcccccatcccctggctctcccctgggcacagtgccactcccttggaagggagggaaccacccrtgagccccagggcttgggaagcctgaggcrggcctctgcctctccctgcccccagcacaattggcagagatgaggcgggtggtggacrgctgggctgtcgtggcagggtctgcacagggccatgtcctggctgtaacccaggcagtgggaggtctgcagcctggtcatggcctccacagcaggtccctgtggacagacatatctgcatatttatcaataaagccttttgctccttctcgcttgcctggcatttgactgaattctcctgcagctctgtggggcccctggagctgttctggtatgggaacaggtggatgcctggcctccccagctgctctgggcatgcaatctccagcagagtgagcctggaactgccagtcttctgggccctgatcccagctcccctggtgtcctcatgagtcctcaggaaaagccactctttgcttttctttaaagcagagccatgctgcctgccttgcctcctccatcagttgctgggaggattaagcaggaagacagatgtgaaagtgcttgcaaggcgaagacagcacctcaggaaggtggtctgctcctgcagcaagaggggctaacttccggccctggagacgctgtagccatcgtgatgttaaagcaaaatctctgacagatttagatcgtgtgtcagaggtttgtgtcagcttcccagcaagggaaccagaaaggaaaaggaaccggttcctcatgcttcctaggggaatgcatgcatatctgaagagaagggaatcttatataaggctgtttagctaagggcagccaccagccaggtgagccttacagaagcacagggctgggtgtctgcagttccctagcagattaacctgggtcacagtgactcagagctccagcatgcgagttccaggtgtggaactgagcaagtacagatctgcttttgctccacttgggagtatttttccttcttagtgagcatgggcagcctcctggccagggaagtctggcactgtctgggcctgacagggaaaccctgggagggtagaaggatccagagtagctgctgttcctcgctagctgggcttagtgctttccggagacccctttcttgaagcaagactctgtaagccctgcagaggtcccctgagcacttaccaagagaggagacagattggataaggtttgttcatgactaaaagtcacccagccaaatgcagtgatgcttaacggggaagcatgtgggaccccggagagccgaaggccagcgtgagctgtgatcagagagggagacagctgcccttcctgctaccacggccctggcctggacaagtagagtgtgaccctcctcacagccagcagggcctgtctgcaggacagcctgggagtacagaactgtcctgggtcccccgtttggttttcaggccctcttcctggagctggctgagcagggtttccaggcatccagcaggtggcactgtcatctgggctggagcatgcagccagcagttcccttttgcaactcagttgccttggctaaggcccaaccagtcccaagtgctcaggacagaggctggacgggctccttcctgcacccctgctcttgggacacagtgccctccggctctaataggccaggagttgggggggcaactggctctgctccctggccctggctccccctgctccctggggctgcccgaggtgaaggtgacaggtgggggaggcaggtggagaattgggccagtgagctcatggcaaaggcgcccagctgggcaggggtgggtgctctggcctataaagcccccgaggccctgtggcctgcagaggcggttatggacggcaccatggaggactccgaggcggtgcagagggccacagcgctcatcgagcagcggctggcacaggaggaggagaatgaggtgcgagcaggggtggaggtgcccaagggggtctgaggagatccagttctgctgtcaaggggagggagatcctgtctgctacacctgtggtggggaggggggcagatgtccccaggggcccagttgggcctcattcctgtcccagggtattactggcagggggtattgctggcagcagaagactgaggcttcagccttcaaaattaagtcagtgagatggggagctgggctgggcttcctaagactgctcaccctcctgggccttgagagacagtgggctgtacaaagcagacagctgggtgctgcctgggactttcaggaatgtgtggccctgtgatgccccagtgactgagtgggaggctggggcaggggaaactccagtatttggccagtgaagaagagagtgaggaagggatgctgggaaatgaagcatggattttgccagcctgctggccacccttggggagtcctttggcgtgtggtgttctgggcaattgcattttctctgggataaggaagtggagcggtggcagggggtgctggcttgtcctattctgcatttttttttttgagacggggtctccctctgttgcccaggctggagtgcaatgcatgatcttgactcactgcaacctccgcctcctgggttcaagcgattctcctgcctcagcctcccgagtagctgggattacaggcatgcaccaccatgcctggctaatttttgtatttttagtagagatggggtttcactctgttggtcaggctggtctcaaactcctggcctcagatgatccacccaccttggcctcccaaagtactgggattacaggtatgagccaccatgcccggcccctactcttcactttatttaaactaatacttcatctagtgttggctctgccaagagcccagagctgtagaaatgggtggaccaataagggtcagaccctgccttctttttaccaacccaggattcattttagcccatttgttggtttcatagtcaactaagaaacaaggcaaagggaagaaatgactaaatagaggtgtgaatcagaagtggaggaacacaaggggctcatgaattgttctgagggccttcaaggactcctctgtggacagggccaggtgcagtggctcaagcctgtaatcccagcattttgagatctgagatctgaggtgggcagatcacttgaagtcaagagttcgagactcacctggccaacatggtgaaatcctgtctctactaaaaatacaattagccaggaatggtgtcaggcacctgtaatcccagctactcaggaggctgaggcaggagaattgcttgaacctgggaggcggaggttgcagtaagccgagatcgcaccactgcacttcagcctgggtgacagagggagactccgtctcaaaaaaaaaaaaaaggggactcctctgtggacaggaggatacctgagctgggccttcaaggggactcagtggagtccaggatggtggagggtattccagcctcaggaaatgcaggagctgaagtttccatgagtgaaagcgtggctgtcttgataaagtctggtagtaggggctaaggctggaaagacacaagccagagagggccatgtaaaagatatttattctgtgggcagtgaggagccactaaatgttattgagtgagggagattggtgtcatctgacctattttaggaaagcagctctgatggccctgagaaggacttgttggaaaaggctggccctagcaggaatggaggggaggagataaatcaggttggaggtagatgccattcaaaaaaaggagtgtgactgaatgaggggtgaggaggaaggaagggtcaagaccccaagggaagaagggatgaggtcaggaaagagcttggaatgagccctggctggggcaagcatccctggatctctaggaatcccacttctccctcccccaagggcatgtgcctatggttggctggtgccaggcaggtgagtcatgctgctatgccagttctggagtgctgccaatagacacacagaccttcagcaaggggacgcagagcagtgtcttccgttcattcatccaataaatatagctacagagctgtcaggacaccagtgccaggccctgtgctaagcattttacaggcattctcccatttaatctgcatagcaatctatgacgtaaagtgggagctttgtgtgtttcatgaactcacattcaatgcagcaaacagctactgagcacctactgtgtgccagcccacaaagacaaacctgaaatgaagggctgtagggtctgaggaagatgtgggtgagcattagagtccccagttgtctctaccaggccccagcctggcagggttcttggaggagaacctctgtctagcctgtgccccatccccagggtgggaggggaaagagggccccagaggccagtgcaggggctggagttccactgtggcgagtttactgggttaggtcatcactgagaacttaagggttagcagagatgctgagtctgcttgccatcatccattcgatcattcattcattcaccagtcactaagcacctactatgtgctagagcctgtcacagatgctggggacaccaagatgattaagacacaagctcgggagccacagtggctcaggcctgttgtcctggcgcataaggaggcaaggctaggcatttgaggccagcctggacaacatggaaacctctcatctatgtgacaacaacaacaaaatttatagccgggtgcagtagctcacgcctgtaatcccaacactttgggaggccaaggtgggcggattgcctgagctcaggagtttggaccagcctgggcaacatggtggaaccctgtctctactaaaatacaaaaataattagccaggcgtggcggcatgcgcctgtagtcccagctactcaggaggctgaggcaggagaattgcttgaacctaggaagtggaggttacagcaagccgagatcacaccaccgcactccagcctgggtgacagagtgggactcggtctcaaaaaaaaaaaaaaatacacaagctggccctctggatgctccctgaggagcccagccagagtcccacatgcagcagtagctgcagccccaggttatctttcattcttggaagaagatgcagtgtttctgattaggccagcactgagacctcaaaccatgaagcccaacatgaaagagagaaagcagtggctaacagaaccttcagaatgaagacctgggaaatcggctctcaaaaccaccctgaaggagcaaatgcgggagctcagggaggaatgggaaaggggcctgagtgctctgtaagggtggcctccttcccagctgccacattgactcaggaccctccaacctgggcaattgttcctggactcatagccacacaagctgcctggtggggactgcagagatgggagtgccagcacatcacaaagagagaagaagcagtccaggaaaatcagagggcaaatgcagagaagacctggcaggcagttggacctggattacagtgaaaagaaggttaagacttagagcccgtttcaggctgaaggctgaggagctgctgctcccatcaccaagttcccctgaaagcaatagtttccaagctctagacttcacagatcagtgaaatctgagagaaaaaaaaaatagtatctaacaaagagctgccaaattttatattgctgagtaagaacatttaagaagtaatcatctctcatcataattatttcatcaaagtgaattatttatttttaaaacttattttatttatttatttatttatttatttatttatttatttatttatttattttttgagactgagtctcactctgccgcccaagctggagtatagtggcatgatcttggctcactgcaacctccacctcctgggttcaagtgattcttgtgcttcagcctcccaagtagctgggactacaggtgcgtgccaacatgcctggctaatttttgtatttttagtagggatggggtttcaccatgttgcctatggctggtctcgaactcctgggctcaagcaatccacctgcctcggcctcccaaagtgcttggattataggcgtgagccactgtacctggcctatttattttttgaggcagggtcattctctctctctctcactgtcactcaggctggagtgcagtggcatgtccttggctcactgcaacctccccttcctgggctcaagtaatcctcccacctcagtctcccaagtagctggcactacaacaaaagccactacgcttggctaattatttaatttttttgtaaagatggggtctca

SEQ ID NO: 6903 - DNA, 13040 bp, Homo sapiens
tcatcatcttgggttcctagatactcacaccaggagtgtgaatatgggtattcctgtcattagtaagctacaccctccactactaagcaaaactgaaattttatctttgatgtgatcagttagtgtgaatcagcttccagcattacataattccagataaaaattcataggccgggggtggtggctcacgcctgtaatcccagcactttgggaggctgaggcgggcagatcacctgaggtcgggagtttgagaccagcctggccagcagggtgaaaccctgtctctactaaaaatataaaaattagccagatgtgatggcaggtgcctgtaatcccagctacttgggaagcttaggcaggagaatcacttgaacccgggaggcagaggttgcagtgaactgagatcacgccattgcactccaacctgggcaacagagcgagactccatctcaaaaaaaaaaaaaaaaaaatttcataaggctctagtttctgaatctgaagctataaaaagaatatcaacatttttaacccaatacaggtatataagcaacagaagactgcctttttaggacaaagaaaatcactttaaatggtaattagcaaaaggaactcatcactctcaattagacgggctaaaaaatacagagagtccaagaagtatataaaagcatcacccctagagaaccatacctatttatgagagaggaaaagagagctatcttgtaaaactggctattgctataacaaatgttgacagggatgtggaaaagcagaaaccttcatacactgctggtgggaatataagatggtgcagtcattttggaaaacagtttagcagtttcttaaaagttaaacataaatttactatataacctagcaaatccattcctaggtctatccaaaatatagaccattcctaggtctatatccacacaaagacttgcatgcagatattttatgggagcattatttctaatagccataaagtagaaacaacccaaacgtccatcagctgatgaacagatatagacgaaatgtggtacatctatacactggaatatgatttggcaataaaaaggaatgaaatactgatacatgctgcaacatggatgaacctcaagaatattatgctaagtaaaagaagctagacacaaaagaccacatgttgtatgattccatttataagaaatgtccaaaaatggcaaactatggagatagtaagtagactagttgctgcctgaggctaaagttgggaacagggattaactgtaaatgggcataagagatcttactgcaatgataaaaatgttctaaaactataccacgtgatggtggcataactcagtaaccttacgaaaatcaccgaatcatacacttaaacatgggtaaatgttatatgtagattatgcctcaataaagttaataaaaaacaaataggcatctccttctctataaagtccaaggaagtaactcacatgtgtgccgatgttgaccaccaaatgtttttccacttcagggctagcaaggcaaaaccagcagggtcctggaggctgagcttcatgtaaaagaaagccaggtgttactatggtccaagcactacagcatataatcaccccacagaactcagctttgtctgatttttatatcctgaaaagactggtatacaacactgccacaatgggctgagcctgtgctcctcactacgaccccctatgaacattttcaatgaaattaaacttccattagaatttgtaaccaatccacaggtaggtaacccacaagtgcaaaatcacacactgactaaagtagcacataactggcaataggctacaacaaaagaacactgaactgggtgtcaggagccccaattaaagccccagctatgccattagccatgaccctggaaaatttaccctcccaaggtcagcttcttgtgtgaaacaaaaagatgaagaaagagaatctcaatgaaacactcttaaagtccttccttcgagtttgatcattctattattttatgaacccatattggttttggaggctcttcacctcattatgttttacagacacaaaggaaaggtgctttttccatagtacaggaagcgcctcagaacagcctcgaagtcaggccattcttattttattttttttgagacggagtctcgctctgtcgcctagggtggagtacagtggcgcgatctcggctcactgcaagctccgcctcccaggttcatgccattctcctgcctcagcctcctaagtagctgggactacgggcgtctgccaccacgcctggttaattttttctatttttagtacagacggggtttcaccgtgttagccaggatggtctcgatctcctgacctcatgatccgcccacctcggcctcccaaagtgctgggattataggcgtgagccaccgcgcctggcccgttattttatttttttgagacagggccttgctctgtcacccaggttggagtgcagtggtgcaatcttggctcactgcaatctccgcctcctgggttcaagcgattctcatgcctcagcctcctgaggagctgggactacaggtgggtgccaccatgccttgctaattttttgtatttttagtagagacagggtttcaccatgttggccaggctggtctccaactcctggccttaagtgatccacccgcttcggccacccaaagtgctgggattacagttagtgtgaatcagtttccagcattacataattctagataaaaattcataaagctctagtttctgaatctgaagctataaaaagaatatcaactttttttttttttttgagatggagtctcactctgtcacccaggctggagtgcaatggcatcatctcggctcactgcaacctctgcctcctgggttcaagcaattcttccacctcagcctcctgagtggctgggactacaggaccgtgccaccacacctggctaatttttgtatttttagtagagaaggggtttcactatgttggccagactggtctcaaaattctgaacttgtgatccgcctggctcagcctcccaaagtacaggattacaggcatgagcccccacacctggccaagaatatcaacgcttttatcccaatatgggtatataagcaacagaagactgcctttttaggacaaagaaaattgctttaaatggtaattagcaaaaggaactcatcactctcaagtagatgggctaaaaatacagagtccaagaagtatataaaagcatcacccctagagaaccatacctatttatgagacaggaaaagagggagctatcttgtaaaactggctattgctataacaaatgttgacagggatgtggaaaagcagaaaccttcatacattgccagtgggaatataagatggtgcagtcaccacacctggccaaggccatgtttatattttatttttactgttggtcctaatgactcattgcacaattctcccctgccagaagaggctctcttagcaatgctgctttccaaagaaaagccaaaataacagttactgttcatagaagaaacctctggaataaaggtacttacgaggtttgcgaggctgctttggatgaggagaagatttgctatctctacctgtggatgaacgcttccttccctgcttttcatttaaatcaaagaaaaactgacaggctgattcttcctggaatggccaaaagcagaagattaaatgttattcaactaacctttagataagtagccgaccactcacatacaagggaacattcctgccatgccatacctatctttcttctcagtcctttctgcacactctagggaagcaaaatatcttcccagttctgatgcctgaagtctcagtcatacatcaacacttatccaaactactgccaaattcatctctttggaaaaacgagttaaaatgcaagttataaagtaattcttgcctaaagcagaacatgaacccacctaaattctcttttcttttttctctcaacagggacatagtgtagtcatacaatttcacaggtcaaacaagcctaattcagccttaagagatgagaaggctgcttggaaagaaagaaaagtctgagaaagcagaccgtgcatgctagtaagggaacttgacattccttgctttagtggggaaaaaattaatttgagaaaactctgctattaagaaaatttcttcagagtgaatcttattttcctactagcaatcatcataaaatcacaaattacattgctatgaagctgctagagccttgcctaaagagctaagaacagataatcactttagacaaagactttacaaataaaactgtaaccccaaacgtctgaatccagtttggacaaagaaagacctaatgtatcaaactgttaaccccaaactacaataaaaaacactaagcttagctgaaatctactaagattttctaaacatcatcatgatttcccaaggggaaaaaaaagatttagattctaacgattaaacttgtcttatgtactaaactataactaggaaaagaacacatataaaaatgccaaccctcaatcagaacataccacaggggcaagaatttgctttcctatggatgcttcctgcccagattttctgtaagggttttcagtgacatccggaggctgttttaccagttctgctgcatccattagcttcatgggaacaatactgaacgcgtaaagatactttagagaaaaagaacataatgacattaggggaaatactatttacccaactgtaatcaacctattttactgtgaagatttcacagaaaacatgtgaaactcagtaaaattaaaagaacagcaaccagcccatccatagctcagagagtaaacagtaaatcaaatgccaattcagtggcctctgcaggggctcaccaagggttgacaaagaaatgaacaagaaatcaaagcccccaccctcacaaaccaggagttctcactcggataatggaatagtgacaactgtcactacaaggcccagagggacttgctgtataacccttgaagacaaactgcttctgtctctgagtcccttatctttgtgtactctgtccacagaattgtggcactgccatttatttttcctaatgaaaattacaaacgaacttagtgtttctctctctgatattatacaaattctgctatatatgctaataaaattttcttaggagactagcagtaaagcaataaatattcatataaatatttggaatcttgcactaatgccacagatatcgaaaactttagataagatataaatagatgtttaaacttactactgattagggaaatgcaactaagtaacaattatatatcatttatcacattggcaaaaactttaataaaactttgacgtgggctgggggtggcggctcatgcctgcaatcccagcactttgggaggctgaggcgggcgaatcacctgaggtcaggagatagagaccagcccgaccaacatggagaaatcccatctctactaaaaatacaaaagattagccaggcatggtggcacacacctatagttccagctactcaggaggctgaggcaggagaatcgcttgaacatgggaggtggaggttgcagtaagccgagatcgtgccactacactccagcctgggcaatagacagagactccatcttaaacaaacaaacaaaaactttgacttgatccagtgagaaatatggagggggaaaaaaaaaaccactgctggggtaggggtataaattggaacaaagtttttagatgaatttaacaatgcttgccaaattttataatgtgcacaccttttgacgaaagtataagttgcttatggctgaggctaacatgtccctgagaataaaacagactgaaaatactaagtgttattcagtttgaaagggcaattaaaagaaaaattacaaatctacatttgctaagaattgggcaaaaaagctgaaaataggctggggaatttatgtggaggtcagagtggaagcaggtatgaaagggtccagcagaagaaaacatggctgccaaagtgttttgagtccgttggcaagtttggcctggccttagctgttgcaggagacgtggtgaactctgccctatataatgtggatgctgagcaaagagctgtcatctttgaccgattccatggagtacagaacactgtggtaggggaagggactcactttctcattccatgggtacacaaacctattatctttgactgctgttcttgaccatgtaatgtgccagtcatcactgatagcaaagatttacagaatgtcaacatcacggtgcacatgggggcctgtcgctagccagcttcctcgcatcttgaccagcattgaagaggattatgataagcgtgtgctgctgtccatcactactgagatcctcaagtcagtggtggctcactttgatgctggagaactaatcacctaaagagagctggtctccaggcagatgagcaacgaccttayagagcragcagccacctttgggctcatcctggatgacgtgtccttgacacatctgaccttcgggaaggagttcacagaagcagtggaagccaaacaggtggctcagcgggaagcagagagcaccagatttgtggcagaaaaggctgagcagcagaaaaaggcagccatcatctctgctgagggcgattccaaggcagcagagctgatcgccaactcactggccaccgcagggaacagcctgatagagctgcgcaagctggaagctgtggaggacatcacattccagctcttatactctgggaacatcagctccctgccagcggggcagtccatgctcctccagctgcccctgaggggccaccctgcctgcacctccgcaggccaactgggccacagccctgatgattcttaacactgtcttccttctgccccaaccctagaaatcactatgaaatttcatgattggcttaaagtgaaggaaataaaggcaaaatcacttcagatccgccccctcccccaaaaaaagcttgaaatattatgaaaaaaacaaaatatcgatttgcttatcttttgtatgcattgtctatggcatgtgatagtggaataatcttcagactctttatctgcctattttcccacttcactaactgttcttattttagctgtctcaatccacaataggttagttttggccctgggaaatcagaaatactctcagagaagtgagaaaaacaacctatttttctggtatattcttttcatcaactgcactgttttccaatacaaagatagattccaggtatcactaagatttccctcaggaaatcttagccctaaggagagcttaggtaagtcctctgggtttctttttttttgtttcccgagacagagtctcactttgtcacccaggctggagtgcagtggcccgatctcagctcactgcagtctccacctcccacattcaagcaattctcctgcctcagcttcctgagtagctgggattacaggtgccccccaccacacctggctaattttttttattttttatagagatggggtttcaccatgttggccaggctggtctcaaactcctggcctcaagtgatccgcccacctcagcctctcaaagtgctgggattacaggcgtgggccaccatgcccagctctttggggttttcttatttcagctaaatgaagttgctaaagaagtaagcaagcatctgagggcaaattcacaaatacccatagagacaaccacatagatgtggaagtaaaggaacactgttcatttgatattttgcctttattcctctgggcctattttcccaaacccttctttaaactctcctacaaaaagacccaaagagacttgacctttcattaccatacctttacaaaggagtctccgaaactgctgagaccttgcagtcagggagaagagaagatctgaatgctaaactggacaagagatacatttatcaggcagaccatgaatatcaaccttccaccaaataggtaaatctttacctttttcttttctggatttccaacatttgccagagctataaaccgggtggcatgctgtgcattttcctgtagaatgatatggtttctacaacatatttgagagacaaaaaattgcaaacaattttacttttgatttgcaatgacaaaatatgtggactctatggggccataaaaagagcagaggtcctcagttcatcatcgccagtcaaatgatttcagataagttactatctatccgtctaatagggcaacaatccctacctcacaaggctgttttaggaagagatgagattatgtcttcagaaaccatcaaaactccaacttttggctttaaaagagttgtaaaattggcaaaatgttgacaatagttcaagctaagtgatggacacatgaggtttcactttactattgcctcttcttttgtgtaataaaaagctaaaataggccaggcactttgggaggctgagacaggaggactgcttgagcccaggagtttgagaacaccctgggcaacacagtgagactctgtctctacaaaaaaaattttttaattaactgggcatggtggtgcatacctacagtcccagctactcaggaggctaaggtaggagaatcacttgagcccacgaggttgaggctgcagtgagccttgatagtacctcagcactccagcctggaagacagaatgagatcttgtctcaaaaaaaaaaaattaaaaaaaaaaaaaatgtagtcctttgtgtctggcttcattcacttaacataaagttttcacggttcaaccatgttgtagcacatgtcagtacttcattgcttttccttgccaaataacatttcatcatatatttaccacttttaatttacccattcaccaggtgatggacatttgggttgtttgcattttgagctattatgaataatgctattatgatcatctgtgtacaagtttttgtgtggacatatgttttcccttatcttgggacaggaataaaattgccgttaccatgctgctgactcttacatttaacctttcaagaactgctaaacagttttccaaagcggctgcaccattttacactctcaccagcaatgtgtgaggattccaattcctccacatccttgtcaacacttgttattatgtatttgcctttttgactactgccatcctagtgggtatgaagtggtgtatcattgtgcttttgatttacattaccataatggctaatgataagagcatctttttatatgtctattggccttttttttttttttttttttttttgagacggagtctcactctgttgcccaggctggagtgcagtggcgcgatctctgctcactgcaagctccacctcccgggttcatgccattctcctgccttagccttccaagtagctgggactacaggcgcccgccaccatgcccagctaattttttgtatttttagtagagacagggtttcaccgtgttggccaggatggtctcgatctcctgacctcatgatctgcctgcctcggcctcccaaagtgctgggattacaggcgtgagccaccacacccagccctattggccatttttatatgttctatgaaaaactgtattccgattcttaagaactgtgtaagttttgagtggcttgttcccaaaacttctgttttcgcagtatatttttagagaacaagacattcttctagaatgagtatatggagatttaacagaaaaacctgtattacctatgattctgcattaggctgtgggattatggtaaggggggtattctcttcttgctcacttaaatttttttaactagcaacacgtaaatattacttttgtaaaaaagaagggaaagaagttattttagggataatccatgccctttatcagtgaagataattctgagcttttacttaactctctcacttgtaaaacactggttttcttggcagtatattctttaagaacttgacctctatatcaggagatcgagaccatcctggctaacacggtgaaaccctgtctctactaaaaatacaaagaattagccaggtgtggtggcggtcgcctgtagtcccagctactcaggaggctgaggcaggagaatggcatgaacctgggagacggaggttgcagtgagccgagatcatgccattgcactccagcctgggcgacagagcaagactctgtctcaaaaaaaagaacttgacctctatatacctactatgctactatgtacccccaaaaattaaaaaaataaaaactccacctctgagtgcaaaagaaaaaaaataaaaaaaaatattttcttggctgggcatggtggctcacgcctgtaatcccagcactttgggaggctgaggtgggcagatcatgagatcaagagttcaagaccagcctgactgacatggtgaaaccccgtctctattaaaaatacaaaaaaacttagccggacgtggtggcacgcacctgtaatcctagctactcaggaggctgaggcaggagaatcacttgaacccaggaggcggaggttgcagtgagccgagatcatgccactgcactccagccaggtgacagagcgagactccgtctcaaaaaaaaaaaaaagacaaaaaaaaattttttaaattttccctctcatttatttttaattgataactaaaatttgtattttttattgtatacaacatgctgttttgaaatgtgtatatactgtgggatggctaaatcaagctaattaacatatacattatctcatatttatttgtggtaaaaaattttttaaagaaatggggctccctatgttgcccaggctagagtgcagtggctattcacaggcgtagtcattgcacactatagtcttgaactcctgggctcgagcgagcctcctgcctcagccttccaagtagctggaaccacagacacacaccatcatgcctggccctgaaaaggaaaaaactgatacaagttcttgattctgaaactgaaggatttccaaagtgatttcaaattagggaacaaactcagagaagatgaatgacttgagagtcacttacttcagtgtctgagtaaccaaatggaaccaagatgttatatggttaaaaacgaacaagagaagtttatacagaagatccatggcaaattcttcaaaaagccaagaagaatgaaatgctactcaccgatatggaagcctctcataataggtcttttccaaagcagcaaaatggtatcttggtttcaagcccgtggcaagactggaaaccaaagcagaaccacattttttggtatccacttctccctagtaaacaaaaacttagtcatccatacagaccaaaagttatcaagaaatgcaaataaataataagacattttgaaatgtctttgaaatttatacatgaatacagatgtggacagaaggaactgcacattgaatttcataagtatggcaatcagagaaaaaatcttaacaaataagggagctgaactactatgaatgtagaaataggaacaactgttggaagccagagattaaaaggtaactcctccatatcaatacccaaaacacaaattattaaaaccttttttggaaagtaagctctccctctggagcccacagactgggcttctagttttggtttgttttttttttttgagatggagtcttgctttgtcacccaggctgctagagtacagtggcacaatctcggctcactgcaacctctgcatcctgggttcaagaagtgattctcctgcctcagcctccctagtagctgggattacaggcacgtgccaccacacctggctaatttttgtatttttagtagagacggggtttcaccatgttggccaggctggtctcaaactcctgatctcgtgatccgcccgcctcagcctcccaaagtgcacgcgtgagccactgcgcccagcctctagtttgttacgtagtgcatctgtagttcacgggtccagacagtcatagtcaattcagaaaatcaaagcgaaaagctaggcttcagggctcctaggatccacagaatatctggtatagagtattcaaggacttcatcaccagcatataatcctttattttgcttcagtcaaggaagtggcagtttgaggaagggcataaccacacccttcttaagtaatatgaagtttgctcaaagttattcttgctcccagaacatccccagattctgttaacaaccaattaagtgatctctcacccacagcattatttatgaactctattctaagagaaggtattacttggaaataagctaacaaagtttgttttccactacgtaaagcaggaatttccttttgtcttatgcttgtttccttcaggtttctgctgaagggcagggaattagctttgaggtcagtcctagcatcttagggactggtgaactatacttttctcctccataaatatactgtatggttatttataagccttgatcaaaatcaatttttagctccccgcaaaacaaaggggcctcattttctcatccttccttacagagcatcatatgtgtctttctctcttccttcatcactttagcagcccttctctcgatcttccctagctttgctatatccttgtgctccaaccagctctatgccttgtattctacgtaaagagtaatcatgggtttgtcaaaaaggaagagagcatcctccttgataatgcctggtatcctgttggcctttttggtcatggacacatggtgctgaaactggcaaggggtggtatacaggctccacttctggatcatcactgataatcctgaatccaaccatggagatttgttcccaaatgcattcttacatttcccttcaatgaagctcacccagtgttttctgccctcacacataaccttttcaaaatcttccttaggcttacttccaccagtgtagcgtttcactccccatgatagttgtcactcctggtgtaccatccttttcaagattactcataaaatattaaaatctggccaggtatggtggctcacgcctgt

SEQ ID NO: 6904 - DNA, 12972 bp, Homo sapiens
gcctttctattaccagtttgctgagagtttttaatcactagcagatgttacattgtcaaatgtcttttctgcatcaattataagatcttttttttttctttttagtctgttaatatggtatgttacattaactgattcccaagtattgagtaagtttgggctgtcatttatattctttttacttgttactggattcaatttgctaatactatgttgaggatttttgtaactatgttcatgaagaatattggtctgaagatctctttcttatatgtctttgtgtgattttagcatcagggtaatgctgacatcagaaaataagttgagaatcactctctattctatttttttttgaaagagatcatatcaaattgctagtatgtctttgcaattgattgaatgtttgtgtcccccaaaaatctgtattgaaactctgatctccagtgtgagtgtatcagaaagtgaggcatttagatcatgaggaaattagatcttgagggtggagacttcataaatggaatttatgccattaccaaaaggggctccagacaattgttttgctctctttctaccatgtgaggacacggcaagaaaacatctatgaaccaggtagcatgctcttaccagatggcaaatctgccagtgacttgatttggacttcccagcctctggaacagtgagagataaatttatgttgcttacaagccaactagtctatggtactttgttatagtagcctgagtggaccaagacagtcttctttaaatgtttgatagaatttaacaataagactactgggctttgggttttcttttttgaaagggtttcaaccgtgaattccatttcttcaataaatacaggtctatttgggttttcattccttcgcaaatatttagtagtttttagttgatcttatctaagttcctcttttttttagagttgtttgtactgttctcttattatccctttaatgcctgtgggatttagtaaatcctccctttaactcctgatatgtgtaatttggcttctctttcttttttttttaaattgtcagtctggctatctgtttcattaatcttttcaaagaaccagcttgtacttttttgtacaatttcaactcctttaaattcgttaaggcttgtttcatgacccaaaatatagtctgtgttagtggatattccatatgtacttgaaaagagtttgtattctgcagttgctaggtagagtgctttatacatgtcagattcagttggtcagtggtaatagtgagttattctatactagcagttctcatctccaggcaattttgctcctcagtggacatttggcaatgtcaagagacattattgattgttacaactagtgggcagctattggcaaccagtgggtagaatcttctggccttactctgctaaacattctacaatgtacaaggcaggtcttcccccaagccctgtcaccatcctaccccctgctgacaacaaataattacctggtctaaaatgtcaacagagccaaggttgagaaacccttttccttgctgattttctctctacctgttctattgactgctgagagacaagtattgatgtctccaattctaatggtaaatttatccatttttcctttcaattttatgtttttgcttcatttaaattgaagctctgctgttaggtacatacacatttaggatttttttgtcctattggttaaatgatcattttattaataagtaatggtcttacttcatgtaaattttcttgttctgaaatatgctttatctgacattaataaagtcactacatccttcctttagtgtttgcatggtatgtctttttacattcttttagttcaactcactgttgcttatttaaagtatactttctttatagacaacatacaattgggtctttttcttttgtaatctatcctgataattgtgtcttttaattggagcatgtaggtcactttcacttaatgtaagtattgctatgtttgagtttcagtctatcattttaatagttgttgtctgtttgctctttctgttcccttttcctgccttctttgtattatttgaatttttaaactgttttattctcatttatatatttagttttttactatttactatatctttttatatattgccttagtgattgctctgaggattaaaatacacatactttactgtctgcttaaaattaacctttcaccacttcaaaagcagtgtaaaacccttaccaccatataggtcttgctcacttccccgttatgtagtagttgtcttatgtatgacatctacatactttgacaactccatcacacagtgttagttttctttcgatcacatacatattttaagggtatttagaagagaaaaatactccacatttactcagatatttagcatttccattgcacttcctttatccccaaagtttggagttcctctctagtatagtttccctttcacctgaagaacttccttggacatttcttttacagcagcttagttagtggcaaaaacttatttttcactcatctgataatgtctttattttgccttcatttataaaggatactgtcacagtctgggttgatagttcttttctttcagcactttaaaaatgatgtttccagcacctctggcccctgtggtttctgatgagaaacctgcagtcattcctattgctgttcccctgtgggtgatacgtcattgttctccggcagctttcatgttttttctttaatttggagcagtttgattatgtgtctgagtgtgaatttctttatttatcttgtttggagttcgctgagcttccttcctgtgtttgtaatttttatctttttcatcactgttggaagttttcagccatttttccttcaaatgtttttctgcaccacaactgtttttccacactttctgagatacaggtgtaagtataggtatcagcagagatagagatagaggcacatgtcacttcatgatgtgaatactttctgagaaatacatccttaggcaatttcatcattatgtgaacatcaaagagtgcacttacacaaacctagatggtatagcctactatagacctaggtagactacatgatctagtctattgcttccaggctacaaacctgtacagcatgttactgtactaaacactataggcaattgtaacacaagggtaagtatttgtgtatctaaacctggaagaggtaaagtaaaattatagtatcacaatcttatgggacaactgtcatatatgcaatctgtcattgaccaaaacatcattatgcagcacatggttgtacacacacacacacacacacacacacacacacacacacatatttttaaagcaggactttttacttttaaaaagcacctaggggtctgtagtaggttattccatttaggtttgtgtaagtatactctttgatcacacaatgaagaaatcacctctgcctttaaacagaggcagctcaggagagttcagagttgctatacaactttcagaatcacttttcctgaatttcttccctgttgcaatctctctgaactctgtggctcccaggagcatctcttctcccccgactttttggtcttctggctggattttgttttctaaatctgttgcacacttcttgcaactgtttctgcctctagagccaagtggcagtagggtagagaaaacaaagcaaccccccagctctgaggaccacagtttggtcaaagacaatggttctcttcttccagcttctagatgcctgcctggatgactccagggatacagggtggcctgggatgagacaggagagaagcaagcaagcaaacaaacaaacaaacaaaaaacagaacaccaaacagatttcccttactgtctctgacccttaaaaatccatttcctgttccttggaccagaaagagaggctcttgttggaaatcagaaatctttctgtcctcatctggtgcaaagttttgtgttctgggctgcccttgagtccaagccaagagaaacggttgaggggagaaaaaggagttcaggaaacttgtggccagattggtctttactttgagttatggatttcttctccaatctgcctgatatcacttatctcagagtccccagagtgcttctctgtgcattctgcccaaggctttacttgctttcaggagtttggtgggaccaagtgagcatacaaaatcttaactggacttggactccactttgttttttaagctgttttatcctatctggtttctcagagctgaatgatatagacagttcagtattggtgaacatggtgctggctctggaaaccagccaattatgcccgaaaatggggagtccactatttttaaagactagggtcagcttacaaggcctgtgtaaatgaacatcaatgctgccaagagctaagaactgtcattggtttactgtggagaccaccatctatcccaggcggctgtgatccatcaggcctttcgcagggtaggaccctctgacccttcagctatgagtggtgacagtgggattttcagtaggtgtgagacaggcttgtacacatttccctttgacactgggtgaggaaaacatacaactatattcccacacagcctgattgctcaatattcatgtgctatatcaacttgggttctaataaaaggtacaggtgatgaagtacagaaactgtagagcacctctccctgcccatccctgcagggaacagaggcaatgcaagtttgtgtctcccaagggcatacttctgcctggtttggaaatcttggtccaaaaaaaaaaaatcagcaagcaggaggcacaggaggcctttaaaaagaaaagggggtcccagaaccaaacagaacagagttgcgtcctcttcctggctgcagaccttcctcacttctgagcctcagtctcgctatgatagggtaatgctgtggaccttgttattgaggattagaaacaatatgtgtagcaatttttaataactaacattaatcaagctattactatgtaccaggcactgttataagtgctttatagtattagataatttacgccccctcatagctctgtaagggtgtctgttttcacaaataagaaaacacaagcactgggaatttaagaagattgtgagtagagtagagctggacttctaagccaagcatgcagaagccagaatccccatcacatcacattgacattctgcttccctgcactgaggcagtcacggccatttatcaagtttctgtgcagaggagttgaagtccagtgtgaaggatgagagaatgggcaggagatggaaaaggcagcattctccatgagctttgcccgcaccccccatccccctgtgtgctcatgatggggagttatggtgctgctgggcccagcaatggcacaccctgatatccctgggctgagcaacaggcttttctgcatggctactgttggactgtagccaaggcctcactagttcctctgggtccatgaggggaagagggatgtgagaagttggtcttagtacccaccttattctctaagatccaggcttatgttggctggaaaactcagcagtccctccccaggaacttgtatgaaaacttcaggaaatcctagcttaatgcaggggtctaggaaggggcagatatccaagaacacacacacatggctctgggttgggggtacgtgacagtctgggacagtggagagtatttataagtcggggcatggcacagctagagggacatttagtgtccttcaggctgaccctgcacctcctattttaacatccaagaaaatcaaagtctgaagaaggcacacagtttgctgacaatctatggctgggctgggtccactttgccctgacttctctccgcaatcctctttcttgctttttaaaccactgaagagcaaagcgtcatgacgtgggggagcccagtgccctctggcatctcctaaccagatgttttcttatctttcagcagtttttcatgatttttcctcacactgatcactatccaatcagaacaataaayttctaacactcccttactaaaagaacatggttaagggtgagaaagkccccaagggcaagaagatcaccctcaaggtggccaggaattgcatcaaaatcacttttgatgggaaaaagcrccttgacttgagcaagatgggaattaccaccttccccaagtgtattctgcgccttagtgacatggacgagctggaccttagccggaatcttatcaggaagatccctgactccatctccaagttccagaacctccggtggctggayctgcacagcaactacatagacaagctgcctgagtccattggccagatgaccagcctgctctacctcaacgtcagcaacaaccggctgaccagcaacgggctgcccgtggagctgaagcaactcaagaacatccgcgctgtgaacctaggcttgaaccacctggacagcgtgcccaccayrctgggggccctgaaggagctccaygaggtagggctccatgacaacctactgaacaacatcccygtgagcatctccaagctccccaagctgaaaaagctcaacataaagcggaacccctttccaaagccaggtgagtcggaaatattcatagactccatcaggaggctggagaacttgtatgttgtggaggagaaggatctgtgtgcggcttgcctgagaaaatgccaaaacgcccgggacaacctgaatagaatcaagaacatggccaygacgacaccgagaaagaccatctttcccaatctgatctcacccaattccatggccaaggaytcctgggaagactggaggtgacttggaasctgaccctgaggcagaagggaaagagagagggagggaagagggcagtgggctacctccacaggaaaccaagggctcccctgtggctgcagcagctctttcagycaagcccataaaactcctttccttactttctcggcgtgtgattgtgttgattgaagggcttttgattccttgccattccacacatttctctgtcctctgcacacacactcacaagtacaggcacagtgagtcaggaagggcctgtccatgtccatcctactcttgcccccagatctctcttgtctaccactgtggcctaagcagctaatgccgccacacactcactatcactggcatttcagagcccactgccagatcccaaatgtgaagttatttaatggaaatgttttgggtctgggcttcaaaggcaaggaatctcagagcatgagtttgtaagaaagtagatgagcacttggtgttgggtaggggacagagctggaccacagaaatgggcaggttttattattaaggcatcaataggcagatagcttcttaggcccaaagcaatgttttctctctgaactgagcttgcataacttgctctatgagctttcttggctaaacctgcagacctctgactggctgtgaatgaatgaagttgcactcccatcctattacattcagtgtttttccagatcctcataggagaaacgaaataatggtggcaagtatggattggtgcattcaataaatcaacaccttactcagcaccatgctaggtgcaggggccgtgtccctttggggaaagcttggcttgcctggtgcaagctggaggagagagcaactgaaatgagatggggcagagcaccactgtctgaggcattcaggagatcccagtcgtggatgtgcagggctggcctggcaaagagaaaagccaaagattctgaggttggacaggtctaggtccatggcagctctgcttctgacttggcatccccttgggcacctaacatagcttaggttccctcactcgtgaagtgggaataatgccacactgaactccaagtgttctgtgcctctaaaacaggcagcacatggagaacgtactcagcagaagccagttttcttccagaaccataacttagttcattgcaaagctgaaatactactttgaacagtggtgccagttacgctagatcttttggtagaaaatgacagcaaccaagtcaatcctcacaatagctgagaaccttctctggcctccctgtgtaccacactctcacaccttcatgtgggtaaaagaaaagatcaagaatgataccttgagggaggcttttttcccccaggactttcctatgttgttggcaagtttgctgagtggatgatgagaagcaccaagaggcatccatcagtgaagtggtattaacttattttctcctcacattgtcaaccacagcacacagcacatttcatttcttcaccccttgctgcttacttcctcttgtaatgcttagctatgacaaccctatcatatttctaaaaccttgggagatctagattcaaaattttcattttagtttttccctttattaagtgtttttcattgtagaagtaacagaaccacaacatactactaaatatagtagcttaaagcattcatcattctacagtatgtcagctgcaatgctggcagagttccttactagttatttttctgtatatatttttatacatagttaaaattatagcattcctgtcatttctgtcctgctttgaaacccatgctgttacctggtattaataaacacactttaaaacatctgcaagatagttattcttgtggatatacataactataagttactgttgtacctttaagttattttcagttttcactaatgggaatagtcttgtgatgagagcctatataactaaaacattttaaaatatttttaattatttccttggcatagcctcattattggaaatattgtgttaaagggtgtcttttaacaataatgttgatacatgccatcaagtagctcataaaaggtttacacacatacgcctaccagtaacgtagtagagaacccatttcccggcatccttgccagcactaagcactgtccttcacatttttctcttcacctactgtctgaaatgactcatgagaaccccttctgaagctgaggggagtgaccgtgtctgagacatgtgtgatgagacaccatgctgtaggtataggagccaccgctagcctgccaggtcttggacatatccataagggagccaatctgctatttcagtcacttcttctctgacccaaaaggtatagagtccacgcagagacatatgattgagacagacagtgccggatagctacatgatgactttccatttcaatttctcccccttcagacactttttctttagaattaattttccctccttaggtattcaaaaggttcagcaaaggagagaagttaagagaaacatcgaggttacagagcccacctggtgcccagggtttgctggtccacgtcctcccttccccgctgcagcacacttcttgccatgcttggtcctcaacacccttacttgctgccaactgcttggctggcctgacactcactccagccttgctctggggctttatcatgctttgcctcttatcacacatctcaggaaggagtttcaagtgcatttaactttaccaggattgagacatacacaggcagtgggctggatttgcctcaatgcattcaagtcagacacctctttagccaggaaatgctggcagcaggacgaagcagactggagatagagaccagttaggaggcatcttccgcattctatttctttttctgccaaggaaaaggtttgatgttggtgttccttcatgctctaaaatacctcagtcacctttactccttggaaattgtattaagcataaaaatacttcataggaaagccttgggtgttctctttcctcaaatacaacaaaacccccattcacactaacctgaccatcctgaaggtcaggcatgaccttggtgagctggtgtgacctctgcccttgctgtgtttgcctctgtggcctggagcaattgcctcaccttcttgtgtctccatccccagaatacgcttgacatcttcctagagtagctgtggcaaaatcttgaagactactcagctaacagaataaacgactctgaagaggagaagcccccagttaggagaagacagagtggcaagtgagatgttctggaaaccaggctcgccggagctggccaagccaccgacttgcttctcaaattcacttcacctcccttagctttagcccacctgtgtgtgaaaatgactttgggaaatatttgatgtggtttttaaaatgtatatagaaaaaaatttaagaaaattacagattatatattatagacaactaaatatttaagactttaagacttaaaaggcttactgcctctacatttcactcagactagtacatctcaatgccagtagtctgtgataaatttatgtaggtataatgagatactgatatggtttgggcatttgtctcctccaaacctcatgttgagatttgatccccagtgttggaggtggggcctaatggaaggtcatgggggtgggtccctcatgaatggcctggtgccatccttttggtaatgagtgagttctcactgtattagatcctgttgaaaattgattgttaaaaagaccttggcacctccctctcctctctctctcttcctctcactatgtgatgcctgctccccttcaccttccaccatgagtggaagcacctataccccaaagccctcaccagaaggaggtgccggcacctgtacagcttgtaagaaccatgactcaaataaacttcttttctttataaattacctagccttaagtattcctttacagcaatgcaaatggactaagatacctcaagcaactccaatttatacaaaaagttatatagaaaaatatgctaaaaaatactatagataaggtaggattttaacaaatctttcaatggtgcataggtaggcaggaaaaagaaaccagagaaataaacaacaggaaaaaaacaaaaaataaaaataaaatggcagacttgtattctaacattttgataattgtaataaatgtaaacaatctgctttatttgtaatgaccacaaaatggaaacaaccaaattttgctcaatgcacaaattgttaaacaaactggtatatttctatcatggaatactactcagcgaaaagaggaacagaccactgatacatgcaacaacttgaatgtatctcaatggcactattctcagttaaaaaaaaatgcccatctccaaaagtcacatactctatgattccatgtatagaacagtctgtaaatgaaaaaataatagatatgaaaaacagattcatgattcccaggatttaaggatggtgggggaagacagggaggtaggcataactataaagtggtagcacagagatatctttgtggtgataaaataactgtgtatgtcgattgtggtggtggttactcaaatctacatgtgataaaatgacaaagagctacgcatacacatgtaccagtgtcagtgtcctggttctgaaattgtgctatagctatataaaatgtaaccatggtagagggggatattaagtgaaaggtgtacagtgtctctctgtactatttttgcaactgtgaatcaatattttgaaataaaaattaaaaaaaaaaatcttacagcctagatgcaacaatcaatagatccttatacatctgcccagtgctgatttatgaggcactatggcaagcttaacatgagaatctaaaacaccgagtcagcctagatatacaattgaggcacagagtaaggcaattcaggcaccttaacctcggctcagccggctaatctaaaatttcccgttgttgatcttattcttgcagattcctgaaaaagttgcaaaataaatagaaactgcatgaaatctctatgtcccaggttttctggaggtagctgggcacagggggcaactaggatggcagaaaccttgaaccagtgggttgctcatcagcattcctgggcatttgcacacctgttccccacccctggtggtgtgggagcataaaggttgtggaagcaatgtggctgggtagagttggaaggaaaaagggcaggcttgctacagtgactggggcttgcatcaggcttttgccctggaagggatctgaggttacggctaaggatacagcagagatgaggcatgaacctagtacagccagacaaagatgaacatggaatggggccacggccaaggtctgatcatgacctaggaagaatggccagggatcagatgctcatggcccacaaagccaaatgtgtgaacaagctcctagatgctgcagcactggctgtcactctcattttgagtctgcagccaggtgccgttcgcctctggtcccagtgactctggtatagacagaggatatgagtagtttggtctccacagttgtgctcccagggcttcagtacagcaagaaatccaaggaccatgcttctctactcagtggtggagccagcactacctttactagttaagcatttgtgtaccttacagatctgtagccaatggcatgaatctctagggggcaggattgaaggaggagaaatgctaggaaggggagcttgaactttagcctccccccagctaactgtggtgcctctggggtgtggttaattaacatggaaggtcatattctcatgggaatcgcataggttcttatggtaggttttttaagttatttgtctttcattatttttcaaagataatctctaaaggagacaataaactgaaaatgttcaactgtaaatctttgcacccccaaaataaatttcattctaaacattatatatgaagaatttatacagttaagaatgattttaggaactgcaaacacccaggtacaatcaggccctgaatacaagcaccatctcacacccagtggctttctccagcccggggatgcttttgcctcaatgacatggtggatgtttccagtttatccaaaaatatgtgctgagcccaagagagatttgagagaaagagaatcagatag

SEQ ID NO: 6905 - DNA, 50552 bp, Homo sapiens
cctttgttctcactccccgaagtaggccagtgtgagcctttgtggtttacattatgtggctaaagcaactgaccataggtttttttgttcgttaagagtgttttctaaaaccgcagatatgcatgagtgggggctgaacctaagataggttttcttctgcctcgatgcctacatttaacctctgtgagtgccccttttccctgctttggactaggtggtcatcagttcttaatgacagaggtttcactgcaatattctacacatcgagggaacggggcgtgccatctccgtgtttcctccaaggagccatagttctgcaagaaaacagttcctcacgcattgctcagtcacacaagggtgtctgaattcatccagtcacccctttttggtcctcatcagtgacctctgctgaaaacaacaaatgtagggaaaaaataacatttcactatataaagaaaattaaaccggataatgaatctaagacacagtccaccatctatggcagctggctttgccccaaggaaaagaggacttccagttctgaagactcaattggcacctatgaaacaggtctctaagttaactatttcacaatgtgagtgacttcatttagtgagtgaggttctattttacctccccttccggtggaagccggtggtgaagaatgggatgttcattttcaccattctcccattctgagtagcctcatgttcaggcacccccttggcatatggaagaaaatgctgacccagttcatcttgaatccccaccagcatctttgactccaaggtgtctgaacagtgagaaagccactaggaaaacccataatttcatacaatcccttgtggcactcctctgactgcttgcctagctatcttactatatgcggagactgctgggccctgggaggtgtctcggtcagactggcagctgcctgcatcttcccccacaaatcccatcacagggtcaaactgcaaacctgcaaatcagcacggacattttaagaatggacagaatccaatggagagtttctcttggcagctaatggaaccccacaaaattgccttcagactattgagtctgttttatttctaattaaaacagatgctaacttccttccttacagtacgtttgctcaaatattgacatatcttctgctaaacatttaactatacatagccaaatacatacgcaggcacgtatatacctatgcatatatacatacatatacacacttgaaattcattttcattctttatcagggctccctcaaaacaataaaagatgacctttgacaaactacttatagccccatctcatcatttctgggtttttcttattctgatactagtggttatgccttccagaggcctgcttcaggtgtggattagattttaccttgtgttattttcattggcaaaaccagaacgacgctgtacctccctccattctccccaaattggaaaacagaaggaaaaataaatctctccgaatgtgctatcttaataccacaacgatgaccgtttttgttcatttttttccagtataatttgtagactgctttgtttcacttaacattatttcgtgtttttctatgatactaaataatctctataattatccttttaatggccgcccagagtgaatgtaaaccataatttacttaactgtttacctattgttagccattaagttgcttccatttttcacttatttaagttggaatgcacattttcatatcagccattaatttaaagcagcatgcagagatggttctccgtcactaatctaaaaatgcagggtttatgtatttacagctcactttgattatgaaatttaatttgagggtaattaagacatttatattccaaacagctcctcgacatctagctctctcgagccaaacaggcacaaccatgactagccattttcacctcaagacagcacagtccaatgaattctaaaacacaattttcttacgaaaaataaactttatgaactcctgctgctttagagccaagagatcagctccccaaaccagagtccatggttctctagggtgacccagccaaggcaagccatcatgaagaatcctattgcagcttcatgctcagtccagaattcaaggcaacattcactcagtgctccaacacccactgtgttaccggaactacctggatgtccttgcctaaccagcacccagatacactgtgggaacaagacaagggcattgctcagatgagtttcagttgtttgatgttttcaagtttatcatggatcacttcaagttacagagttccttgagcaggggtagtgggttagggcatgtgattcaaacggattcagctgtttcaatgggtgtggcccactagcctcctcactctgagcaagttgcaaaaaatcccaaaatcgtgtgcctcggtttctcaatctgcagtatgagggtatcaatagtggctgccttgtaaggatatgatgaggatcaaatctagaaaacacaactgctatgcataggggaatggtgacatttgattagcacataggagcacttaactgcatgcttactgaatgttaatgctacactgtaacgtatgtacattcacttgctgaataaatgcatgaaggaatgatgaatgaaatagtgtgggagaaggttccacttgtcttagggaaagtcctctgtagaatgccccatttcctttcataacaaaatcattttcttaatggtaatcactgtaagccttaccctccacccccaataaagagcaaatgaacaccccgaaaagatgtgtccaccttagtaattcttaatgtccagaaattcaattttaaagctttagaaaatgtcatccagccgtcagaaagaactcataacctcatttgaagccaaaataaaccagccacaaaaattccttggtgttttccctatcagagaataagaactcaattactattactgttttttaagtcagcaataacaaactaaagtgattaaaaatcctaagtattaccatcatttttttactaacaacgaaatgatttttatgtaccagcaaccctctataaaacagagaagagcttagaattttttattattatttggccaccagcaattaattcttctgatttgttgtattagtttgatggttgcgtccaagacctagaatatttcttaccccagccaactgatgtaagaaaattatttcagtgcagtccctagcaaatggtgatgatgaatagcatggcaggacaaacttattcagacacacatttttcagaagtagcagggaaaaggctgataaattactagtaaattgctttttgtaaaaatgctctctctttcaaattttccctagtatgaaggtcttctgcagaatgatggcacaatacattctgacatacctggacaacaaaggcagttaaagaatgaataggagatcagagtgaaggttaagatttaattttcttattccacccccactgctacccatactgtcccccacaccaagctgtcttgtgtgcatctgtttaacctgctgggataagaatctctaaaagccatcgatgctttctcctgagcaggcacgccttgtccctccttccacctatcatctagccatcccaaacggggccaagatattggtgcatctccagtctgtttcttgccttttctctcctctctaaaactgcccagtttttcaagtttcaaattgcagcaatctccaaatacccccagcacctagtaaagcaccaaggacttcctttgctgtctacgcaagcctcacctttcaggacacactataggataatcgaacaagagcccgaggcatccagaggtgcaagggctaatgcagtggttctctgccaggcaagactctgctcccaggctcatctggtaatggctggagacatttctagttgtcacactgggagggagcggtgctacttcttcagtggggagaagccagggactgctgaccaccctgcaccgcacagcaaagcccctccaacagcaaatgatccatcctgaaataccagtagtgccaggatttagaaactctggtcccacctaaatcaaatgctgcagagattgttttttgttgttcttacacatgattacctgttagttgttcatagcataatgtatgaagaatttgattccttcactctttcatccagtgaacagcagtggaggccagcaaggtgacaagaccaggctggcctgagacatagaggtcattttaatagagggctagtcatgtcacttacttttagatggtggctgtgaagttgtctcttcttcccccttatggaaccaccgtgcacctcggcctgtcatgctaactcagtaagggctaaggatgtggggaggggtcatgcctctgtctgttggacagctgggtctatgagaacagcatggattcagcggtccactaaagtagggtcctgctcctgcctgcgctgcttatttcctgtgtgacaccgaaaaatgacgcaacatctctgaaccctagtatcctccttgaaatgggaagtgtagccttgaccttcaggaacatttgtaagcaaggcattctgtatgtgaacgagcagagcatctggcactcgaaccacctcactccagaagcagtggccatgctgcgcatgtcatagttcttgtggcattttccaatgagtgctgccacaggtctctgggctggtttttcagacacccccaggacagggcacaaggtcggcagctgggctgggggcaatgtggacgaagtctgtttctgtgcagctctcacgggcccatgtccatgaccttgcctctctgggcactcagctccagccactcgggccccgtacaccctcagtgccttccgtttgactgttttcttctcaaacacaaggggggaaaaggcgaagcctcactcacaaacaacacacttaactctattttcttgctttaagcgcagccatcaaataagttcttccatgtgcaataaacagctgtgaatccgcctaataaagtgaaggcattttaccccactggtattccccgagaggagtcattggccacctgcatctttttagctgcatttaataattcagcccaggatgaatttgcatgattaacataaagcctcatagttttatttgctttcagaatttaagtactgaaaccaccaccattgttttcattttcggaggttgtgatcacaacacaaaacttgattctagaatgagtaatttcttttatttttttttttaagaattattttccagtaccactctccatggaataaaaggagttgcaaacatggcctttgtagatgcagggaaacccacgttccttttagagctgatgttaacccatgagaagcgaccacccctcgacgacttctccttcacggttcccatccaggagcacggccaactctcccccggaatccataacggctcacgcaaatagatttctttccgttcctcctcggagggctctccacatttatctgctcgagacgtggcagctccagtaagtctttaaaacagcagctctcccagattccagcaatagattaatgacgtcatcctcaaaaaatagtcaaaacgcaaaccaaataagtagcacttggtaaaccatctgcctaagaaggggagtcacgcgtgtgaaaagataatttgcaaagcagaagaggcagcatcattgggtttcttgatgaatgtagtaaaacaggtttgtctaatggggaaacatgcattactgtcaaaaggaaagcgagtgtatcccacctggaaaagcaagcaggctttaatatctgagaagcatttcaagctgtgctgccagcgactctcagcccgtgtgattttccttaacataaaggccgacctcacctgcttaaatataattaggaaacaggcagtcgtcgtggtggctaaaagtttgtgcggccggtgcttgagtgtgtatttctgtcccactgacacctctgttgctgtttctgaatgcaggaaccatggtcagtaaggacaccggcaaatgcatactcacaacrtcggagagtgaagtggaacccgccgcctgcctggccctggagatgaaatacgccctggaccccaaccggcagattaaaaaacggaacaaagccctgcaggtgcggtttaaggatatctgcgaggcacagaatgagcagagggacacacagctgtcctcgggccagctgggggagaagcgggaggccaagcccgtgtcctgcagagcagcctaccgcaaatacatgacagtgcccgcacgcaggtccatccccaacgtcaccaagagcacaggcgtgcagacctcgcccgaccttaagaagtgttaccagacgttccctctggaccgcaaaaaggggaacctcaaaagcctcccagctgcagatccctttaaaagccaaaacaatgggtttctaacagatgygaaagagaagaacgaggctggacccatggaggaggcccggccatgtggcgcggggcgggtgcacaagaccacagccttggttttccattccaaccaacacatgaacacagtggaccagcctttgggggtcaactgcacagagccctgtaaaagcccggagccgctcagctatggagaagctgcgctccaaaactccactcggcctccatccgaagagcccgattaccagctgctygggagggccaagcaggaccgggggaggccaaactccgaggagcccgctccacctgccctcaggagggtgtttaaaacggaggttgccaccgtttacgcacctgccctcagtgccagggcccccgagcctggtttgtcagactctgcagccgccagccagtggtcactctgcccggcagatgacgagcggaggagagccacacatctcaacgggctccaggcgccctcggaaactgccctggcctgctcacccccgatgcagtgcctgtcccccgaatgtagtgagcagccgtcgcagactcacaccccgccggggctggggaaccagcctagtcccacrgcggttgctgcaggtgaagaatgccaacgaatcgtgcctcatacggaagtggtcgacctcaaagcacaacttcagatgatggagaacttgatcagttcaagccaagaaaccatcaaagtgctcttgggggtcattcaggagttggaaaaaggagaggcccatcgggaagggtatgtatgttcacccatgtcttaggaagctatgcaggctgatcaccacagagtccatctgtagccccaaacccaagtctgtaatgagactaaagccagcatttccgtaaacaggtcatagtctaagggcgtggcgagctccaaggggtcgcagattattttatgatactagacgtcactgcatcctgcacgatacgctttctggttaatgttcatctttctggccttgaattcaaaccatacctatgcttagaatgaattgatagacctttccttttattctgctagggctaaaggtttatgatattgataatgtataacaacatatgccagtccaaaatatctattctaaataagaagagaatcaggaagagaagaggccacaggcctcttaggaatcgtattaggaagagaaaggaaatttcatgtgacatttggaaaagtaaatgctgacttgcttataayaaataattgaaataatattggtattcaggactgtacaaggctttacatcatagacagtgtgttttccattctgtacctggaacccaaagaagcaatgggcattgtgagaccagtcctgactgtatatgattaggagacagatgcccttccccacgggctgccctatgtgtccagtggggctgcagaaagaatgatactaacttcacggccartactttattgcgttgataagaccatcttgcacttcatgttttgaagtttaaactgtgcagcagcatctttaaaaacaaatgacctaaaggtggggttttagttcttgagctccccagtgcggaagcctcctacaggccggcatgtgctcagctgatacaaagcagcctgttctactctgggtctgggggttatcggacttcgcctggattgccgagacctctcttgcccattgccccttgaaagtgtctgtgttcctgctagcctgtgtactggaggtaacatcggaggcagcgccctgttgcctcatgtgatgtgcacccttcactctgcgagccctgagccctgggtttagcaagctagaagccagcctgaaataagccaagtaatgtatttccaggacagaaaaccacctgggcacaaagtttccttaagaggattgctgtggctgagttagacagtttgctgactgcaaagaatggggaggaaacacctcctgccttaaggtggaggctgaggtgaaaggcccagctccagcagtggagaggctggggcaggtcctgccctgggctctggctgctccagcttggtgcaggaggcctgtctacagcttgatgctcttaagcaaaaagaactgccagccaaatgtacaaaaatcttaacagtagattcataggtaatctaacaccatataacatttccaaaaggccttgttcartcttgggtttacatctccattttcatcccatttccatcagtacagatscaaaagcaacactcatcaggcgtggggtgggggagaccagtgatttactgatcagtagtccacattcctgcaaaaaaattaaaaggtcaaacattgacccagtcactgatgttgatatagttggtagtgaattaaaccagacagcaaaagagaaagatgccaacatctttggtgaaataaagttcaccaaatggtgtaaaatgaaatatgtacactaatgtgcatactcacaggagtgtgtgcccaaagaagaacctgagagggctgaacacccacgaacacaagaaaggaaaaccgtacgatatatgggagcgccttcttacactcctcttagaacaagtatggaagattgctttaaataagatcctcagggttctctgagatgccatccatctagcagtgtggttctcagtttactaagatatgtctgggtaggaatctggcactgagggcttgggcaagggctgtatgtctctgtgccttctttcttcacctgtaagttgagatcactgtctgtcctgcagacaggggatggaatgacatggggtgaccttctaatgtgttcagcctagtggcaggtgtgtctgaatgggtagatgtccactagtggcatgagtgttgatcttgctggccagcaatgctggagcaggggtctggggaggacttagtggtcttgtgggcgtccaatgtgatgaatgcatcccctatatgcccggcacacaggctgccacacaagactgtccctgaaactctggagctgctctatccaatacrgtggccactagctgcacrtggctattgaaattcaaactcaatgacaattgaaacttcacagtcacagcagtcacatttcaaatgctcgatagccacatacataagacagtgcagctacggaacatttccatcatcacgaaatgtcattcactccggtatcccagaacatggcacagtgcctggttcttaagcatctgaggacttgggcaccttaaatcaagacaaaggatggttttactttaaaatcaatcctagttcagttgctgccagcacaagctcacggtggaaggtagaaaggcaggtctctgttgtgttcctgggaacattcacttcctctctctcagagccctctggactcagatagcaaagaatcaagtgccaccttatgggctccaaaattcaaggccaccttatggggccccctcttgctcaatgccccagggtcattaatttggctgaaattcaaatttcccacccgtcttctccatgtcagaacataggagaggactgcagcctcagagacaggcagataagatgcaagctcattctccatcccttcccagaccctgggtacagcacagagtcccaggagtgacagctgtgagcagtggcagccagcactgggctgggacatctggaacaacaggctctggagggaagggaagtagcatctgctgatttccatggtgtaaatactgctaccgtggccaatttcaatctcatgaaatcctaaaaatgtaacactctgctccactcagcacccaaccaatcccttgaagggcaagttctaggactttagaacgagggattcacagggcttactttatgtaccagatctgaactgggaagytggtattttagttgcatctcatggtttaaaaaaacaaacaaacaaaaaaagaaaacaggaaaatgcactctgtgtacactgatacatagttattatatgatacgacaatgaactcaaatgaccaagttaaaatatcagtggaggccgggcacggtggatcatgcctgtaatcccagcactttgggaggccaaggcgagtggatcacttgaggtcaggagtttgagaccagtctggccaacatggtgaaatcccgtctctactaaaaaatacaaacattagtcgggcgtggtggcgggcacctgtaatcctagctcctccagaggctgaggcaggagaattgcttgaacccgggaggtggaggttgcagtgggccaagatcacaccactgcactccagcctgggcaacagagcgagactccatctcaaaaaaataaaaataaaatcaatggaacttttcttggaaaatattctaaagcctacaaatcaggagctggagaacactcttgaagctggggaaagtcagttcctctccccacttgccaccccaataaagcatacaggggcttccaacagaatttcatctgcattcagaagagtcctagtgagggcaggcacctcggagcccatsagtttgaatrcaagtgacaaatcttgcccccacatttccacactatacttaaggtctgacctggcccaaaggggtcatgggcctgctccttgggaagccagtattctttgaatcccgctgatggccctgggcaatgtatgtttcttagaacatgtttattgtaaaatctctttaataggacttcttttcactattgagtttgtcaggcaagtgcttccctgtagttcttaacctgtgcaggaatttctgtgtcactggctacaaccgctctcagtagcttccaaattatttttcgtaagagactctccttcattattttcatttgcttatgtagatttccaaatggcttcggcagagaatgtttatggctgagacaggttaacctctgtgagcttcaattttgtctgaaatcaactaggggtggtagacactgaaatacagtatctrcaaagctcccacttataaccagcacacagttggcgctgaataaaggacatatcctgttacgagcatttcagtgggatgaattctgcaagtaggttagatgtgcaaaaagtatgcaaaatcacgccttttagtcccttgtaaaacactggggcaattcactaaaatcactctgctttatgcagtgcgggcttgcatgaatgccaagaattatcctgcttatttcagagctcttagtattatgcttgtgtcttctggggaagttcagggtcacacaggctacctaaataagtcactaatgggagtcattgaaggctaagaacaaggcaaatgggacagtggatttaaaaaacccaatcaattattasaacagtgctaattcactgtagcagctatgggattcctgggcaggagatcctcagaccaatggggtgtaggtcttggtggctcattgggtaaactcaccagcaactacagtgtggcaaccccgacagcgctctttgcctcttagatttcctacgccaaacatttagtctcttgaagtgtccattggctggtgacagcctaatgatactctgctatttggagaagaccagaaatgatcgtgagaagctttacttgaggatatcaagcacatgatcagaatctgtcactgcccagagtgaagcagattcttctatgggccaggcctccctcagcatttgctgggtgttacctgcaggcttggggtagggggagagagcaagaggaccccaggcccttaaacatgaccagcaggtagtgataagaccctgaggcttcggggctttgtgactttactaattcagagcaaaggcaagagtatgattaaaaacagaaaatcctaagtaacacaccaacccaaagagtctagtaccttgcaggaagggtggcaaacccagtcatttatcacctcccatcatccctgccaccccatcatgggggcagttccctgtcagcaggggttctgttcatcctcattgagaaagggtggtttcttggtggtgtgaggccagctctcccaagtctcgggcacacagtggtaaaaaaagaagctaaaggaaccccctgagttcaggggctctgtgagggtgccgcttacggtggtgttcaagacaagggagagaggaagaaagagctgagggatggaacgagttaatacagacgaagtgtggtatcctgtaccaaggtttgctcaactttaccaaaaacaatgaatagccaacaagtaatggaaggtcatgtgcacatacacatacttaagaggtaaggacttagtctcatggacatctgtgtttactgcaggggctcagggtcagctcctacatggcagaggtcagcaaacttttctgcaaagggccaaatagtaaatacatattgacagccagtctttgtcacaatgattcaactctgccattgtatcctgaaagcacccacagagaatctgtatgaatgggcatacttgtgttccaataaaactttatttacaaaaacaggtggtagccagatttgggccacaagccataggttatggactcctgatatatggtttgtaaatacagtgaccatattcatacagctaaaaatgttcaggccagaatatgggtgcaggcagtccaaggtgtgtgactgccaagcacaccggcctatcattcattcacacatttagaaggtttctgccaaacatcactgaagtgatggacactgtgccaggcaatgaggggatgtgagagtcaaaggaattcgggcccagcctttgaggggttcacagttcatcggcattcaggctgttcaaatatacgcttaattgttcatcagcccatacaacctggggtcctgctttggaactctgtgtgtgtatgacacacatatacctaatatgtatgtataatgtatatgacagcatctcttggaaacatgaaaaaggtctcattctcccagcagcagraataaaaagccatcacagaacatgtttgcgtgatgtgacttgcgttaacctagaatattgatgctagatgggtagaaatgatatacttgctgtatcttatgtcctcatattgacaaatcactcagaatcagagagacctgtcaggggataagaaatctctgaatttgctctaattaccaatgcccaaacagaataaatactgcatcacaattacagaggaagcataaggggaytatttaagttacagagcagaaagaacccacatggaaaattgtgcaccgctgcagcagctgtgcataaacgctgaggaatcacgaaggtgtgggcttagagtctgatttcctggcttcccaggctcacccctccaagagccaaggggaaagctgggcacagtgaggtgatcccatcccaatttggctatgcactctctagcaggatgattaggttgttcttgccaaaacctacccacttaatagagatcaaagtcttccacctggttagctgagaatggcccaattttgaggagaggaggtgggtgacattagacagtctctcaacagcctctgcagtcctgaaaatgatcttgtggctcttctctggaatactgagtgccgtgttccctggctctggccagatgcatcacagaaaagcagggcattgtgagcagcagagagaaagcagcgctgagctgagatcagaagcaaaaaggttgttgctgccaaatgctctcctgtgccttagcactccctatttgaatggcatggaaatgtcagcacttcattttctaatattcttgataaatcagtttcgatgtctctctccacatttatcataacccaaaacattttaaatcattccagccagctggctgaggtcagcctcccatgcacttggttcttccatttttccagagtgagattcaggagagggatagggtggggtgaccaggctctccactctgcaggtcctgagatgctgaccttccctctcctgacctgcgtgcacaggcttattaacccctctggacctcagcttttctctgtaacaaacagctgagaatacctgcctcttgggcttctcttggagatgaaatgaattatggacaaagagggtctcagtcctcaggctatgtttgcactcagtaagttactacctttgaggttactttgctactgggaagcaaccctccaagtgctaagattcagggaggtgaagccaggggaggagcttgaacacagggaagagattttcttgctttattttacagggtggtgtattttggggatggggggtggtggtgaggatcactaaatggagacatgaagctttgtcttggtggtttccagagaaaaggacaggaccagttcatttggtgtcacgggcaggggagctgatgtascgtcaggagacctggattttgttttagttcaccctggcctagcctctgagctacattttttgatatgaaaggaacatggtccaaatgagaggagaggccctagaggctcctttctgctccaagaacatattctatagagatgtctgagaacatcacaatttcagccactgccttataataytcataaaagtttcggggcggggggraacctcgctgcagatctccatcaataaaagtgtgcaatgatcccactgttctgttttctttttcctcttgacacttcatcaattccttatctctcccagtactacaaatgctagagttggtctctgtcctgcaaggttgcaatcctttgaattgttttcagggaagccattttcttttctttttctgttgaaactaatggcttttatttatttgcaatagaatattcaagttcgaaaccccaaatataagttatcatttctttgaaattttgaaatgggaagcacatttcatattctttctatcattttcttcatttaattcacagggtcacagcaagccttttttatagcttatatttatataactttgtaaacactacttttaagttcttaaaaaataataaggctttccatctctaatatgaaaaataaagcaaaatatatttgaaagaatataaaacacatttcaaattcttgctttgggcttcatgtaggtatcacacatacatgaaaatgtaatttaaataatcttcctgtgcagaatgccaaaatagatttcaaatacctcctcagccttttaagttggtaggtgaataaaagcctcaccaccgagccactaggcaatccagacagcccatttgcagataaaatgagcaattcaaggcatggcatgaacatttatggaatttatggatttgtgtcccagaatttggatttaaaaaaaaaatgaaatgcaagttctaattttcaaataattttaaaaactccatgcaattcctgctaagctatgcaaaaatggtttgagctctatttcccactggagctgagggagcgttctagtgaaatgagaatccccatacagatgacctacagaggtcacctattttgggcacctacaatgtgccagccatttggtattatcttctttaatctttagagtaacaatccaaggtgggaatgccctccatgaggaagctagagcttggatatgctcagtaccttctccaaggtcaaaaagctggtaagacatgttaatgccagaattcacatctgggctgtcagaccggcccactcatcttctctctcccctgaaaatggggaaccaacatgaactaatgaaaatgcaggcatttttttgggccgggcgcggtggctcacgcctgtaatcccagcactttgggaggccgaggtgggtggatcacgaggtcaggagatcgagaccatcctgcctaacacggtgaaaccctgtctctactaaaaataaaaaaaattagctgggcgtrgtggcaggcacctgtagtcccagctacttggggggctgaggcaggagaatggagtgagcccgggaggcagagcttgcagtgagccgagattgtgcccctgcactccagcctacgstacagagcgagactcygtctcagaaaataaataaataaataagaaaatgcaggcattttttaaattttttaatttttttgstaatgcaagtctggattttcccttttacttgaaaaggctacagaagctcctaccctcccaggcctggtagggttcatgccaattcatcttytggagaaagcatctttccggtgctagagacagcagagatcccctcattgagagggtcccataaataaagtgtattgggaaggatctgtaatcattaacaggaatcctctctgtgaagtaatttcagacaaatcaaggccattgatctttaagtccagggatctgggtgccaggatgcaacgtctctccttgaggaacctgcctgggaacccagttcacaggccatttgtaatatcagtggtccttcagaggaccgtcacatgcctgtctggctcttccttcctcatattgatgtccacatccatgtgaacaacaaacatttgatactgcattgtttgcaatgcaatataaaaataaaccttaaagataggctggaaagaacattcatgaaaattgagatcctgggggaaaaaatgatctaacaacgagcatccttcaaccaaaaaggcagtaaagttttttctatcagtatgtcattggttacagcactaggttatccccctagcaaagtctcataactggacatcaagaaatttataaatgatcacaccaaaatttcaagattttagtctttggcaacaagagctctgagacatttgtttaaaaagcaaatgcaaggtcaggcttttgaaacaaagcactaaagctccaagatgtataagttctcattaaaaattgctaactaagcttgatctaaaaacacacatcaaaagaaattaaagataaaagactctgtggatatttaccatcagaaccactggcaaaaaatgacaacattaatgctttcaaattcgaacctctgtgacagtacaagagctgaagaaatatgggagtcctgaaggaaaatttggtttaatacagtatactcacattcttattttcattctagtttgatagccagtgccaccaaaattcattttcattaattttcaataaattatagcttaagctttatctctcctccaggaaaataagttaatcaactcggcctcagctggaaaaagttgttttccttattaatagctgctcctggtgccttctgggccaaatgacttgtttgtatcattgtcatcattttgcaacttagtatttccctgactgcatgaatgaaggaaggaaaatgtaagctttgccctgtttataatatagccaggcagtccacacacaaaataataattactagctttcctgatatttatgttatgattttatattatgaaaatatgattaaaaggcactaaagctaaaaaataaaaagtcctgccttaataatagtgttcatctctgtatttgtccctgtccaaatctgcatgtatttctgacaataakaatgtctataaaatactgatgcattccattttcttcatcatgcatgatggctctgtgaaaaaggaagcatacaagttgctgggacagggctacagagaggagcaacaaaaacaaggaggcagggccgggagcagtggctcacgcctgtaatcccaacactctgggaggccgaggcgggtggatcacctgaggtcaggagtttgagaccagcctggccaacatggtgaaatcccgtgtctacaaaaatacaaaaattagtggggtgtggtggcgggcacctgtaatctcagctgctcaagaggctgagggaggagaatcacttgaacctgggaggtggagtttgcagtgagcccagatcgcacctctgcactccagcctgggtgacagagcaggactctgtctcaaaaaaaaaaaaaaaaaaaaaaaaaaaaaaaaaaggaggcaaatgacagggaagacaaagggccaagggagaaagagaggagagggagcccggctgacccctgcgtcccctgggacgccacccaggttggaatctccctgctaactgtgatgctttgccacgatccaccagcattgttaccctttaattcttgataatgaaaacaagcattaaaacttccctaacagccagagcctccccagaattatagtgtcaccacatctggggagctgcgaggccaataaaagttaatttgtccacaccatcgaaagaaagccactgagttcattaagggtgtttcttcctggaacacgtccaccaggattgcttcagggcaaaaaaaaaaaaaaaaaaaggaaggctttatccagacacggaagtgggcctggtttaggtgcaagactaagctatttattttcaaaactgggtgtcggaagcagaagacgactgatcttttttctacttgtttgaggaaatttaaaatgggctaatatgaatactatttagacagacgcatcacaaaattgtgaragtcctattttccctttcagaagcaaaagggcatgttatcagttcacccaaaagggcactcacacagactcctcattcattcactcattcattcattcactcaagcattattcaaaagatatttctcagtcatctactctacttctggccctgaggtgggcactgaaagtttgcccgcccgggaacagacaaaaacctctgcccacattgtgttgaccttctcgtggagggagacagggaaagcgaaatagctacagctcccggtatactccatggcgataaatgtggcggagaagtctcaagcagggagggagggagaggtgggaaggaaactgactttcactgggcatgaaaggaccaggcattgctgatgcacctcaagccccgatctgcagaagtcaccaagctatcagctaggattgtgaagaggaacaaagacatgttcccagccagcaaaatgcccagtcccataggacagagaaagtgcatctgatcatcagattccacagtggcatggtctgcaagagagccacaaacaaggtgctgggagtgctgcactgaggatgtgctgtgctgccccggagggaagagagaagccgggcccggaccaaggatgcaggtttgcatgcgggttagaacagtcccatggaaggagtgctactgttcagggttctgtgactctgcttccttaacccatcaagaattccttcattttggaaacaaaggtcttctggattttaagtgtctgggggcgagacctgtgttttattcttccaagcaactgttccccagcacaggccatgcacagtgctgacacacagcaagccccagatgaactgggactggcaggcctggggaggccggctcgttaygtcggctcctttgtagcaaagtccattaargtctatgattagaacactaagtagaaataactaggcttgttgaaaattatcctgacatgttaaatgagaccacatggagtttacatgtacaggtgatccttccagggtttaaatctcgattcctggctttaggggaatgggatgtgtgtgattctgagaactttgccctacmatggaaaaaaagtaaggtaaagagaaatgggatgaagacagacccaactcaacttctgaattagctgtgctccaaacatcattgctaagtaatttgtgttgaggttgccagggtagccctcaaaatcctttaatctatatggagattcagcattagaatgctatcagatctaactatcatgttcttagagatatattacttccaagttctcacatgggatgacaaaaatagatctcccttaaactaatcaattgggacacaactgtatacaagaaacactatagaaaatgcatgttcatattcagggagattacacgggtgtctgaaaaagaagtatttgcccttccccagaaagacattctagacaaatggagaatactgagagctaatgggatcagctttaccacctgacatatatctgcaggcgaaagagctggagaaaagagaaaccaatcagacaatatcaaatcgcattaacgttctcgaaacccatgagtggtggttatattaaagtaactctaccacagacactgcctgtcccatcatcaacgtcctgagcagaaaacatgggagacagttttccagagttttacttaactgtcaggaaaaagctgctaagtttctctggaacaggggtcaatccaacccccatagatctgagacaaagacaccttctcaattatattttttcatttgttccttcattcatcattccatgtacccacagatctttcttgccatctcctctgtgactggcgaacaaagaaagattagcctgccatgacaacatggcaagacaggtgttctggcagaggaaatggagcagaggcgaggagagtgggggagagccagccaaaggatccgtaaagaacagctgctccagcagaactctcaaaaggtggcagccgggcagctggagaggtgtcaacactcacccctgttcgacatcccaaaagcaggggagaacagaggcagtactccaaacagccttgccagtatggagggtcacaatttgtgctcttcaaattgcaacttcagtttttaccactaacaacttactttgtctacttggagatccaaggccagcaaggatctcataactgctcagcctcacttcagcaagttggatgctggctgacagatgggtcctatcagctactgggaaaaagggaacagacaaaccatcaccaaaagccagtaccgcctttgactaatgaaggggtgatcctgggagttggttatgaaaatcaacttcatattcttttagcaaccataaattggctgttccctcaaattctagcatttaacagctcaaatgctaagacaatgtacttgcgtttccatgagtatatggtgaagtctaaatccactttagctgtaaacagctgacatctaaaataagtacatgtccggggcataatctggcaaactcctggtgagaccttagattcagaaacaagccaaatctactgctcagagtggctctcaaacataggagggaatcactgaaaacagtgcctttactactttttgaaacttaatttctcccagcaatagtggtggtatcattttatgcctctaattaatgtcactttgagactattaagtgaaaaagcccttcaagatgctgacataaatgatggcttagtyatcgagaagagacagctagtgcacaaacctgggtaagaatgcagaagaaaaaaacggttgttgcatccagtaagaaaactgaaagaacaagagagatcaaacttaagagaataaattaacggcaaaaacattttctttgagagcagagaccatgccttttttatatctgcaacaaccaccatctctagctaaggtccatacaggtaaacctaggatacagcctctgaattgattcagtgtgacaattgccataccctatgtaatgaacattttgaagaccacacttagaaggtcatgctttgatttcagcactatccaacgtgctgctccctgacatgctagaagctctgaactggctgaaaattaacaaggcatttaaaagagcagcaaatcaacaactgggtcacttgccctcccctgcactgagtactgaacacatcttccagggaggggcccacagcatgctgctgaactctgcaaccagamcaggcacacacaaatgccccatccagtcacccaggaatgtgagaagagaactttccattgagaatttaagatcttatgaaggaaacagtgttgtgagactatggcagtaaaaacagcacatttacatcaatccaataacccaatactagtactgtaattactattaggtactgtaaaattagtttccacttgctaaccattcctctaggagatgcttgtcactttctcggtctttgcttctaatgacagcacagtgagagacttttttttttttttctttcctgaccttttaaccaaacaattcatgttttgttatgattgcctcaragttgttagtcctgcctctcaggccccatcttcaaggtctcggagacactaagcagagcttggatatgtggccgggaagaaagcttgcagtgatctttctctgacatttctcaacacccttcctaacacccagggccctgctgacttagatctccctgtggtgtcagcatgaaagagcagatgccgtccagccctcccgtgccctgctcctcggagtccctgccacccaggacgtggccatgrtgcggctctcaggctgaggccggcagccaccctcctcctttatcattcctgcagtggygtcacaaaaactgcagcaccagctctgccatgggcctgcccttctttgtttcttttcaaatgtctacccgtgatgccctcttttgccaacggtccgtaaaaggaataactgaaaacacgtataccccaaattgtcaccagtttttaaaataaatatacaaaggtgcatatattccctcttttgctattggtccaaaaaggattaactgaagacctgcatgccccgaattgtcactacttttgaaaataaatttacaaaggtatgtatgtgtgtgtatttacacacaaaaaaattcaggtatgttatatacttgtaagtatacaagtatatatatttatttatacattcaggaattgctgatagtaacaactgaagaattagagccgattattataaaggtataaggtagctagagaaactggggaactgcatgctgagctaaacctgagaggtccaggccattacagagaggtagccctgactagagctccacgctgtgttctgtaagccaagtttattttcctttctttaaagtagagcaaagtcctgtgaagaaaggtggttcactacaaaacagaaatgtaaatgactcaaaaactggactccacaaaaaccaccttgtagaattggcttgtccagatcccttctgtttctaacagagcatcaccttctctttcatgcactgtcgcagagtctatgttcttatagcttccctattaacagttcatgtccaggctcctctaacaggcaagcctaccttgaccaaggagtgttcaaaaggcatcaagcaaggagaggtccagggtccccaaattggtccctgggataaaacccagttctagaaggatgggaggctagagggtcaacagaacagaaaacaaaagcaccaaaaaaagagagctccttggacttttaacactgtccctggtgctgaatgcgatgttttccaagctatatgcattgttaagagaatacttacaactaactgccatgggacgatacatagtgaatgccacaaaatccatatytacaatgaacatgcttatcattagcacccaaaggagttcatatggggagaaaaatgaagactagaacttttcacaatttatacctgtcagggtttttgtccacactcagttggaattctttaaataggtaagtgtgttattctggacttatgaaaatacaaatatggactctatgacttggctacatcaacattaactgaaygcccagaaggtaccaggtattgtatcacgcatggagttacaagcctatgtatatataatacaggctcctcaaagcaaaagggaagagtgctttacaaaggtagcaattaatctgcaagacagaaaatttataatttgtgatccaaatgttcttccactgcaggttttacatcaataacctaagctttctcctctctaaacttctaatctacaaaagatctccagccctactgtcactggagaagaatctgctctagcagtttaaagtttttaggttgttcttccttatggcaatggcaatatagagaatcattcaaagtactgttttctgatgtgtttccaagttgagaaggaaaaaatagggaaattccataacagcactctgtgttccctgtcctgtagaaataacttatctgtttcatctctatttggagaacatattcagatgctgcagcccaattattaatgtgaccataaaattatcagtgaagccaaaccctacagcttggaagcttcaaggacaattagatggattatgaaagcagtaagcacaatggattacatagttttaagccctctattgagaacactctcgtgcttaataaaattttagcaggcataccctgattgacaccagctgctggcagctgcctgtgaattaaccacatgacaaggtcaacactttaaattttattcacaaattaatctcctgctgacattcatggactccaaacaactgattcctttaaacaaaagaaagatcccaaacaaaacttaaacaaaacctcaccttcatggtaatgaagtcctaaaaataattctcacacatgggagaaacatacatatatttagaaactgacagaccacccactgttttcaactagctaaaaaaagaatgaccacagatatgtctccaaagaaaacacaatgactcctttggttcttaccaacaaacgtcagccaaaccatttctcaggaattggtgaattgggctgggttgtaaataaaagaagcaagagaaagaaaattgagtgaaaatgatgttatagaaggagaggattgagagtaaaagtcaagaagtgtttccatgtcattcaaccacctataagaaaaactatagtggcttcccattcaatttaaaataatgcccaaagggcctctcattttatacacatgtcctcatctctccccwctctcacctgctgcatctattccagcagcactggcctttttttctgacttgcaaacagaggaacatcattcccactgcaggatgttaacacgtgacggtctttgtgtttgcaacatccaaccctgggtcaacagatgactgactgctttttcattaccatccaggtctcactaaaaatgtcacctccttagagttcattctagaccaaaatactgcttcacaacacttccttaacactcagcagtatcaaaaattaaccgttcgctcatttatgcatttatgttgcccttctgccactcccacgccactgtgagctttgtgaggacaaggactccatcttattcgcaaatgtctcctgtagagccagaaaaatgtttcacacttagtatgtacttaataactatttgcttactgaccgtaatggaggaatatgtgctttctacaaagtgactgcagtaaagtcttttcaggaagggctttagaagagcaatatctcgggccaggcatggtggcacacgcctgtaatcccaacactttgggaggccgaggcgggaagatcacttgaggttgggagttcaagaccagcctgaccaacatagagaaaccccgtctctactaaaaatacaaaattagccgggagtggtggcgtatgcctgtaatcccagctactcggtaggctgaggcargagaatcgcttgaacccaggaggcggaggttgtggtgagcccagattgtgcccattgcactccagcctgggcaacaagagcgaaactcggtctcaaaaaaaaaaaaaaaaaaaaaagaagaagaagaagaagaagaagaaaaagagaaaagaaaagtaaagaaaagagaagaaaagattcagaaaagcaatttcttactgaagtactccaaggtcctggaagattcctcttgtacatttcaggtgcctgaagcctttgtcctctcattgtcaggttcattgcctatcccaagctgccaattacatgtggtgcagaacaccagccccagcatacaagcaaggtgacagggagcatcagaagcctggggcctaagaataatgagatcctggacctgaagtgtgactgtatgctcctctgtaagtggggctagcataattagaaggctcagggctctaatgcaagygaggcactgggaaacttggacactgggcaaggaaggagtgttgatgttgatgaggcttgatagacatttcccctgaggtttagggcaggaaggttctataagcttagaattcacactttcctatgagcacaaaaagagtgccttcagaaaactgtaaatatccctggtttcgcccactgtaagaacctaaaatttggatatgactagcacatatagacaagtactaggtactttctcctgactgctggcttatacccactagcacaacacaatagtagagcagtacctcatctgccacccaagccaacagtttaacaacacattcagcgtggaccgtgccattgccagcacctgagctcaaggatggcactgacttcactgtgcaaaatgaccttggtcagcactgagcttagagccgagctccagtagaattagctgatggagaaaggctgtaagtctatatagggcaagagagaagggagaagggtgatgtcatcatgtggaagagccttgccatagggtggacaaatctggagccaggtgggaaggtgcaggaggaatgcattcttggggcttgccatgaggaggaaaggggtaaggactacaaaatcaccgtgtctggtgaggaacaaggggaggggataaggcacaggctgttcatcccsctctctcctgacaaagccaacgggagaacggaatggcctgctgtggggttccaaaggcacctcatgtgggaggtgatgatggaaagacgatagagacagccatactgtaattccaattctggctgaaatatgatgaatcacagaaagtgcctggcaacactttggagcagaatatggtcacttgatcaacaaactgcacakaaccatgaggtcacgtctgagttttgcaagcccactgagacaatcacggcatgtagcagacaatccttttgtcaaatgttgatgtaacagacaatataatgaggaaaacaaaagttattttcaatttaaaacccatgatgcagagaagtttacacagcaaaggggataaaaagtactgactagcaatgttgacagaagaccttctgtgcacactgttactctggtgagtagctctgtacgtggaaatttgcccccagagtgtttataagctaatgcagatgggagcttttctcctgccacaaatttaacattccggttatcatgtctgtgcctggacacaaaataatayccagaaaatacacatctgcatgttaaaaatgtcagagaggaaaggctggataaaataggagaaactgtgaaggcatgaaacactccccagctgttcctaggtggctggaccaagaaacagccaaggcaactccagcctggtccagaaaattctcatcatcaaccctttatgtttatacaaccttcaacaatatactacagaaagaccccaagrtcattattattaattttttaattaggggggagaattagcaacctcccctacaaaggccaaaatctgcccggcctcaggggtctgacagaactgaccagagaataaagccagggaaagtaactcagaagttatggcaatgggagtaagacattctaacataaggcttggcattttcttctctaaagagccagagagtaaatgttcagggatttgcagaccaagaggcaaaattgaggatactagaaataggtattttcataaaaattttcaccattttattttcaaaagtaaaaactttattcatggacactgaaatttgaatttcggatcatttccatgtgtcacaaatattatatgctttcaattttttttcaagtgcttaaaaatgtaaaatccattcttagtttgctggacaaaaccaggcccyggcgggatttggcctgcaggccgcactttgccagtcccagttgtagcaggacaggtggggtagagcaaacataagccatggagtcagcatatgtgtatgtggttggtttttcctcaaagtttctttaaaacaccataaatctgcattgaaacatcccacattccctgtgcttataacgaaatcatattatttacttcatccaggagcttatgttcacttctaaatttaatttaaatatcatcttagctgtaggtgttgcattggttttgtacaacgaaagcagagacaggagcaaactgggaagcatgcattaatcaatttccatgaccatgatgagcttggcattgggaaggcatctgatttgaggcatctgctctataaagccagtgacccccagccaccgcttgtaatgctctcctgttcttatcttgtaggctttcatatcggacggggcaagacacagctaattgtgacacatgcaggaacagtgcatgtattatctataggtatgttaacattctcctcttcccactttcttattatgagtgacaaatgatgtttacccacaaatgcaagaacgatctggggccatgctgggatgattctatcagacaaaaagtgaaggaccttacttgactgtaattctaagctacctctaaataccccaccccaagtatagaaccgtgggatgtaggagagcttgaacccatttatcttgcaaatgtatcttagtggtttcaagaattggtataagtttgatggcttgctcccttggaatcgataggtgtgagccctgggctctgtgttctggaaaggctgtaaaacataggcccttcagagggtatagatcaaaggcttgaaagcacaccgtatgtgctaggaataccatggaaagacctgggctgctcacaccaaatgtggaatttcatttcctgggaactctcgaggattgtgctgcctgcctgtctccgggcagaatccctgctccagagcccctacagctgttccttgtggtttttaatttgaagtttgtttatatgactgacatcaacaagaatacagcagaaactcccaacaggaagaagctgtgtttggcytgcatcagtaatttaggattttaagatrtagtcaaaaccttcrgaaggatggctatccttttttcttttctttttgcaaatgtaatttttcacaaacaaaatataaaagcggtgagaaatgttatgagtaagttctttttctaaagtttagactggagaataattttagtgatccaccaaattatcaaaaaacaattaccaaaccaaaaaaccctctaaaaagttattcaaagttactgtcctctgcattaagaacacagacatggggagagcaaagaggcttgaggctacacaatcttcaacccatcagggttctctcccaagggaaagcctagacctggccgtccatgcctccgatccagacagagcatcccagatagggcccaggttccttaaaagcaaaagcaaagctgggtcacctggagaccttgtctgggaggaggcagaagaaaccacaggtagagataggcaccgaaggccacatcagcacattccttaacctcagaggttctgaaccaatgggccatttgcaaagtctggaaggagacgttttcagttgccacaactgaggagctgctgccggttatgcagcaggtagaggccaggaatgctgctgacatcctatgctgcctgcacagggcaaccyccacaaccaagagctatccagtcccaaatgtcaatagtgctgaggttgagaaagcctaccttactgaaaccacccccaccttagagtgttgtaagaggcacacacaagctggtaaggcctcctggcagcaggaagggaggaggggcccctgcagcagcctggcatggcacgccaagctgctgactgttcttggcaaytgccartgaggaggttaaaatgaggcatccatgcaggtcttttcttcaacaattcctccaaattagaaactcaatgatagcaacagatcagagaagtttgcttaatgggaaacttttcactccactcatcttgcaaaagagaattttgaatcaacaacaaagggctgtaacactgacataaaatgaccctccgtgaacatcagtacgttaggaagtgcagagtgtagatgacctggcacgtactcagagttcagcttctgttagtttggaagctaaagctcataccgtctttaacgcaaccaagcaacagtgagtcaagacatccagggtaggttcagagaatgagctgttcagcctaaacctacgtaatattctgtgggtgatcgaaaaaaaawatatatatatgtgaacactgtttaacctaactgaaataatttaaatgaacttagctctaaatccagaattcactcctataaaaagtgacattaaaagtgactgaataagtctctgaaggacagaaatctgtcctttcaggaatkactcgagtggtcactgttttgaactggctcaaacatcactctacatgaatccgaatacatcagccactggtccacttgctagaagaactgcgagtgaccaagcaccacaggaatttgccaagacttaggaagactcactaggtagagggcgaggcactgtgatcgctctggttatctcatacgagcagggaaaatgcatgactactcatcgagaacttttactgcagatgtgattttacagacgggtgatttgggtggcatcttcagaaactgaatagagatgtggccctcggtagcctgcagacccgactgtcacccccttataaatgggagaggcattctagaagaggtagtgtttgaggaagagtggagttttagatctttctttcctgatttttaaaatcactccctttggagtggtcacaatgacaaaacatccctacaacagccaaacttctgctacaaacagaagttacactggaaggcttttggtcccaggacagtctgcagagtaatatttcggctggactcctgctgcctcccaaagtctttatttcattgagtcctgtcaatgaaataaactagtgtgaaactcaagaaatgaactagtattcaaataaagactgcactgtgactaccaagtggaacatagctcatcaaatgctgcttcctaaactccctatcatgttataatggaaataattaaagtttaacgattactcttaaggtggttattatgttggataagagttttctgaggtctgcaggaagagatgataaagggagtgaaagttcacttctggtccattaattgaaaaatcaatcaatggggaaatcataaaaaattgacaygtacctaacttaaacatgttattttaatttgaatygcatgaattgaaatctcccatttgaatgatttcaagttagggcagcctttagaggtgaggcccagacgttttctttgaatgtggcacccccactacagtttcaaatgatctgccatgagccacaccaattttcctgtctttaaagtggagcaaagtcctgtggcagaatctgagatcagaatccttctgaatccatacttgacctgtctctacctttttcattgaatattttgtggtaccccactctttccaaagcactgaatccacagcaatgactatcttctcatgcctcagtggtttgcatgacattcaataatcacatcatttcaatagtgagtactaattgtataaacaggtccaggaacaaatctagcatcctcttggtaagcatgaaccttgagaagtaaggacagagagtcacaggacaaagacagagaagccagttagttaagggtcccagcatcatgggtgcaccacttatgtcgtgaaaggacagggccatatggttaatctagcacatcagctaagagggcttatgtaatcctatctgactaccaagcactggtctgtgtgattctgccctggtggctgagagttgctgatacacagggacaggtcacttccctcagggtcccactgagcaaagagaaaggggagggtgagcaatggggattgagctggatgacctcgcagcttgcggtcagttctgtgagtcacccccaaatgtcagaagcttaagaatagaagtttcttcggtagaaaagtgttcagaacccagtgagttccttgggcaggaggagtcacctattcaggtgactcagtagcagtgtacatgggtggccacagcatctcggaagtatagactccaagtgagccagagggtgtctccaaatttcaaaggctttacaaatctacatccatgtcttgttctcccatgcaaacttacagccaagtcctccttgaattcctgcatatgaatctgtagaaacacaattccagcagcaggggaaagtatagctcaggttacagtccttgctgtcagatcaaagcctggctcttagttgcaaggacctgaatccgggagttcaggaactttcctgtgagtccctacaccaccattacaacccacttctccatatgcaccatgggatgcctggaacaccccgggattgggtagcttaaaggaatttcaaaataaatcttaaaatgtcacatgactgtggttgtcccagaggcttgagaacacgtggggccatcacagctgccagtgttcacacattgtaatttgtcataccctgctttctggaaggccaaaagccctggagggaaatgaatttgaccctgcctgtcttgcatttaaacaccrcttttcactcgaaacccaattaccctctccgagcagcatagctatccaccgtgtttccagtaatgcctggcccagggagatgaaaaggatactgtgttcaagacccggctgcctggggctttagcaccacaggcctgtaataaatgggtacctttgccatgggaggcggtacatatttctctgtgaaaaataattctgtcatggaaatatagaggactagggaaaagcatcaaaaggacaaacggtcttgatgcaatttcaaggcggggggaaaaccaccagtacgacaagcgaaaggtgagaaacatcagcccgtgagagcctgccgcgtacctgcaaggttagggctgagcttctctgccctctctcttgggtggggtgtctgttcagtctccaggtcctctggggttgcactaagggatcatcaaggtcccttccagatctgaaatcccaggagctgctttttacaattatgcaagggatgtaactatgggtttcaagagactgcacagaagggtaaaagtgtggagagtcacaaggcattcctcagctgaaaaacacctctcccttattggcaaatctattgactcagagctgagtaacacttcttcggcagaggattgatgggcttcctcctagaccactgaaaccccaagtaccaaacgtgatctttctgacaaattttgagatggttgacacagctacatctttttctaagatgacagacatcccttcggttgtgatgcagaccgactgtgctactctaattaaaaccatctcagcatgaaagaagattaaaagagattccagtttccgttttctttaggaaaacttttctggcttatcttccatatttcttgtcaaaatatgccgtaattatttcagaaaatgttttgtggataaattactaatataatctttgctcataagcagctgaaatttcttctctccagccctattttggtaattcttttgtcggactaatctgatgagtcacaccacggatgattcagcttttgttcggatgtggtttcagaaaggaacaatgaaacatcatcggcaaaccagccattctctccttcgctgaaatggttaatttgtaacatagtactgcgacaaaatggcctgaattctaatgtgtacattttcatgaaaataacatggaccaactgcaatccaagggcttttggagatgaaagcaagatttaaaacataacaggaattctgactcagattcattaaacagcatctctcccagaatttagaatcttctcgtcaagtggtagaattcctaccatcagttgcaagccctgagtgaccacatcctcccggagcacgctgtgtctgcttcatttctggatcatcacagccaccacacaaagtggcctcaagtgacactaataattctgcagtggatcaatgagtgggcttggaacctgactggatgggaacgccacaaggctccacaccacttgtctgacatcagagagggggagcttgtgaaacgcattgctgtgtactccatgctttcactgtttgatatgatccatgatggtcaaggacaggtggaattttttttttttttttttttttttttttgagacagagtctcactctgttgcccaggctggagtgcagtggtgcaatctcggctcactgcaccctcctcctcctgggttgaagcaattcttctgcctcagcctcccgagtagctgggactacgtgcgcgcaccgccaatcctggctaatttttgtatttttagtagagatggggtttcaccatattggccaggctgttctcaaactcctgacctcatgatccacccgcctcgacttcccaaagtgctaggattacaggcatgagccaccgtgcccagacaaggacaggtggaattttaaacaaccactttgataaaaatgccttagccctttccatttggggtcctaaagggtattaattgaacaggtgtttttcaagggacctcctaaggacaagttctgcaccaggccctgggagactgggaggagtgtgaagctgctgaagacacctccatgcatgccccttaccctgggaccccgggatgagggtaaggacagagctctggcgagagagagccctctgtayggaaggtgagagccacaggtgcaaggacgtaaaaggcaggcgaggaggaggtgaaggaagccagggtgcccgacctggcaaagcagactccaaagaaaacaagataatcgtggagggaggccaggttagggaggatttggatggcctctctagagccctccaggctacggcgttaggaacaactggcaggaactaggaggacaaacagccagggcacccccaaggatggatgggaaacctcgcgacccgtgaacactcccccttagacaggctggagaacatcccagtccaccacaatccttgacggcttctcaagtaggaagctccaaaagaaggcaagttccttccccaaatgactggaggatttcaggaaagatgaggaaaatatctaacattatgagactgaatgaagaattcacaaaagtgatgggttgtattttctcacatcattcttggtaatgtattacaacaccaataagaccacaaaacagagggtgcaaagagttctagataaaatcacgcacactggcacttcactgattccgagtgtattgcaaaaagaaagctggtcaggatagtgcacgatcaagacagccggcagaaccgggcacctcctgactaatggagacctattgttaagagtggtaattgcatttgtatgcagaatccgtgccaattccagcctgtccggagcccacttggagtggagtctctgcagcctttgtcattcagcgattatctcttcatggaagtgccctttccagccctgcttcaatgaccaccacttgtgcatattaagttctttagcagcatgaactgaggtgggggaaattcgccttttgcctaatgtttagtgctctgttcttagtatttatggtgagtgacagggtaggaagatgagagaaaggaatccctggataacaccttacatacacaatgttattctggggtaaggaaatacttttgtttaatgaagtcaggaaaaaagaatgattctgacagatctctaaattcttcttgaaaattcccaaagctaataatccaagttttttcttttctatttgaaatccaaaaatatattatttatgtccctcgaatatgtacggatttaggtttagtcatttttactaatgtttagcaatgccttaattctcttatttagatgctaggaaacttgttacagccattaactgtaactaaaactgattacccatctcaacatattatttgtgaaacaattagttaaaatttattagcagagaaaggctaattatactgatagtcccagcctttggttataccccaaggtcaaagttaaggaggcatttaccaatgtccaaaacagcatgaggggactacgctgtcagtttcatgggaagataaagataattcatgtttagatgagtatggagatttttctgggggtaaatacgggacgcagtcctggccacgatgtctagggctgggtcgtatgaaattccatggggaatagagtgactagggaattcagggtgcggggtccccagggcaggttcttcctcacagataggcgtcttgaaagaacctgtttgagaagggacctcctgcaggaatgcacaggctgacgtttagaccggtcactggtgacaccagatgacacacacaagcagctaatggtttccgtgtgtgatgagaactatcactgctacrtttagtggagatgatgctctcaatgggtatcasgatggagtgggagctcctgaccacatctagaaaccagggttccgggctggtggcccagggaggcagggtggctttgtagccttcacaccaacactgggagcccgggacgtcacccatgtctctagacagacgcactcccatcttcaaaaggagacaggcaggcaaggtgatggccctgggtcatgggatcccactcagggttgggttggccacgagggactcacagcaaccagcttagaacaggaggacaacagccctgtgtcatctccttttcaaggcagttataacacagtttctgtcaaaagttggaaaactggctgttcttcactgaggtcaggaacagcagtgttctgcaggctacgtctcagaaaggactgactcctctgattatcatgactcgtcttcctggcttcctagggggatggcataagatatgcttcatagacatgtggcggtgctgttagtcatggggtgtctttcctcatggagaacttacgatgggcagaggcaatccaaatgacttgggtctgcctctgctcctcggtggcactattttatgggatgccaggttctctgacccctgtgcatctgacctgccctcagacccaggcacctagatgaggctcaggacccagagccgcaggtgcactccagagagtgccacaggtaagatgggcacctaggatgagcttcagtcaagcaagttctccagtatggtcacggaaaacatccaagatgcatttggaaagctcagctcatcgtctaactctaactttggatccttcatagtaaaatatacagctaggatatctggctaatgcttttttaaaaaaactataatcataatttcttgttcatagtataccaggaaaaggggacagatcttacagtttgagtgttactatcatggattagccatttattctggtatttgaagccctacagtgataccataaacattgattaatgcacctaccatgtaaaatagtggtaaaggaaggatacaaagtyacggtgaatcatttctatrtttaaagtgttgaaaagcyagttaactacaaaccactgatattttaaactattaggatgagatccatatatatttaatgtaggtatataatatagaaatagtatataacaaattctatagacagaataaatagaattatacaaatgtataaattttaaatgaaaacagaaaatagggcggcagcactttgctgagattagaagtgaggggatttggttcagttcatcagtttattgtaattcaacaaacaaatagagcaggttcrgagccagcactgtgctaaatgcactgcagacaaaagatgaattaaacatggtccatccttcaatgagttcacagacctgggggaagacagctacgatcccacaggagacaggctctcatggaaacctagagacaatgctgccagagcagtaactcatcccagaggtgtgtggatgaggcaggggggagggtggactttgttattctagaaaatccacagaaagaaggagtgacgtgtgacctaggttttgaaggataagcagggatttgagaaggagtttgccagttttcctaaggtgactctggtaactggagagggagagaatacagagagtgagggagactaagctgtttcaatggccaaggaggaaactgctggagttctggactagagcagtggaaggtgggcggagaggaaggacaccgggtgttctgagggtaaatccactcgacccagggatgctgaggcaggaggagcaagttgagcttgattccagggtctgcagtcatccagggagatgaatgggggctgcaggctgagtctggaaggacagagatgcaggctgggggaaagatctggttctggacatgctggatttccagtgcccctcagatatgcacacggagatgtgttcagaagagaacaacaaatatttggggtcctggttcttctattgcctggmgaggtggccagggtcacatccataaaccaaggcccagaaaggacttgcctgaattcacctcccatgcaagggggagagccaggcctgggatccrgatcccaacttttagtttcctctggacaatgctggtgttgcccatggcactcacataaaaccggccaagttggcgccaatgtcagttgacataaattgttgygctttggggacatggctggtcctamccaaagctacacaataaaagccagcccacatcctggtgcacctgccctcctgggcccaggccttgttccaggagactgctgtgagaagtgggagcacatctcagccatcacttcacagccaagcaagctcaggtccccaaggtgaggtgatttatccacagtggtagagcctgagtcagcacagagccacggttagcactggggaagactctgagatctaattcaaagagaattaaaggcagaggcctctgacctgctggccacygagccacatggccctgtcgaggctagagaccccaaagacaaagggttttcttcccttccagaaagcaagctccggggcaccagattgtcctgcttttaactcttaactgttacacatggacgactgcagaaggcaactttaaaaatgtgttcctcttaaattatcttgaggattcagtgacagcttgctaaagaaactgtggcagggcctgagtatttataggagcatgagacaaacagagaataagctggagaagcaagaaggatgccgctctgcaaaatcacatgcggcagcggggagaagtgttactacaaagcctagcacagtctctgggaagaaaataaagcttaggtgcaggctggagagcagcctgagatgtagggcagattcttctttctttggaaatgtacagaataatcatgttgtaagaaagtccccacacttaaaactttcattttgaaaagggaaagaccaaccaagaaattaaatctactctcagttgctttaatcatgcatcacagggacttgccaagagcacagcgagggcgacacagcyccagggcacagagtgtttgggtggatggttcccttatctggagggagaatggaggtgcaggcagcgagagggctacaaaggtaaatccctacagtccccaggaattcgtgtcttgtcaatatccccagccatccagggatcttcccttctcacccagcaaaatctacagcctgtgtttgactcaggtgtttataggacagaacaccccgcacaggtaaggctggcctggctccagctgcttcagactcatgctttgaatctcaagaatcaggactttttccaggctgctgctcctccccaggagtaagaattcctcatgacatggacactcccctgcccatgctttacaaacaccagatccctccagcaggagggcagcagcaccacctgcagcctcctgcctcctgagctgctggagagtgaggcctgggaggttgcaaggggactgtgcaaagccacagccagagtcctcagaaaccacaacaaggtttggagccccggcttcccacgtgcccgtgtggctgtagaatgagcccctgcactggagccgccctgggaaagcaggtgcacacagcacgtctggtggcctgggaccgtgatggtgctcagaacaaacatcacccagaaaacatccagctagacctccacctgctgtccacaggcaagtgaaaaggggacaaagtaactctcacgctccccttagcacagcgactgtggtagcyggtcactcacaagcagaccctgctggccccacccattctatccaagatcttactgtagaatcctagaagacggaaaggaggggaccgtggcatgggagccaggctccaaaaagatcctggagtatgtcttgcagaaaatgtttcaggatcttcgataagttctgatagaatagaaccaggccacagactccatctggagtggttctgacaatgcctccaggcagagccctatttgtctgtggcaaggaaggggtctcattgtgggaggacacaggggaggacacaacataatttttggccaaaacaaagcagtccagggcaactgggactaaaagtgaggtagaatttgctttttttttttttttgttttaaagacaaagtctcactctgtcacccagggtggagtgcagtggcacgatctcaactcactgcaacctccacctcccgagtagctgggattacagacatgcaccatcacacccagctaaactttatatttttagtacagatggggtttcaccatgttggccagactggtcttgaactcctgatctcaagtgatccgcccacctcggcctcccaaagtgctaggattacaggcatgagccaccgtgcctggccagaatttgccttttaagactctgttctcattcattaattctagcaatattacgtaggcaactgctaggacccagcccctgctatagttgctggaaacagaaagaggatgaccgcatggcatctctgattatggtgcctgcattcgagaagatgcatttaggaagatgaaggcaagtaatatgggaacgaataattatctgtggttagtgcaaaaacaaataagacaggatggattgggcaacatttgggaaggtggtcagacaacaaggaggttatgtggacctgagaaacagtgggccaaggaatgccagccatgccatgagcccagaaaggcgtttcaggtggggagaaagtgataatcatgaagctggcagcaccggacaaagatgtggccccaggtagggcaaccaacactcccaccacaggtctgccgggcagcaggaaggggaagctgaagcaagagccatgggccctccaccaggcaggcccccaggcactatctgracaagccgctgtctcaaatacagagggaggtctgtgtgcagggcagtcccagtgccctggaacatctaccggcagcttttctccaagtccactactctaaccagaagagcaggtgttgctgccttttgatccatttagctattaagactaaagggacctttgttcgatgtcagccagagttggccagaccgttaaccttctgatgctgcctcctccagtcaggtttctgcttcrgwctcaacccagagactcggtgtgtcaaactcaacccagagactyggtgtgtcaaactcaaccsagagacttggtgtgcttccccaagaaaagtccttgagcaggaagcagtgtccagaacaatgcacattattccttcacacctctgcacacgttgcctggctggtgcacgggcgtcatcccacasgcagatccactgcaactcacatgtgacagatggggagatgggctggggggcggacctcagggtcaacttgctggcaggcgtttccaagtgggcactcacagactcataagtgccctctaccaargaacctgcctctggttgcagattcccagggcagcataatggggagtgcaaacaggaatcaactcgacagataaagtcgagtcattttgttaacaagaactcagattagattactctgtgattacatggttccttggtgtgataaattggttaataacaggattcccagtgtagttgcttaatgggaattcaataattacaggtagccgaaattgtactgttagcctaggagatgctagcgccttctctctgttctaataacccaaaaccaatctggggctgttgaaacggttacgatctggagaacacaccttcaatattaccaaagcaccttggtagaattacgcttctatacctaacataccgtatattcacagactcgattgacaggctcttgttttccttgttaaatgtccaagttgaagagatccctaatagatatctttattacttagctcttgtttccattataagattagtgatcaatagataataatggtacaataatatttaaattgcatcttacagtttaggaggctcgttcatgggcatttttcagtggggagagattgtcaccacaattcagtaattacgacagcctgggaaggaactattttctcccccttgaagtgaaagaattgaagtttaaggagcccccgactcccaaaccagcatcaggtggaagaggcagggtggaaaccccatgtccttctagtgcaccacatcacggaactgaggcccggatttcattaatgcagcacagccttagactgcacttttcacaactgtccttagaagagactatgcctccatcatcacgtagtctggattagcaagacttaaattcatgagattttattctacttcctataaattagagcataactcaaagaggctcttcgaaaaaagggaaaaggataacttgttttgggagcaggaggtcactagccataaacttctctggcaatttttttttttaattttttgagtaatattagagtcactgacaatgagaaaaatggaacagtggatttaaaacatgaaatggcccattagatgggtcctgaacttgttttaaaactccagataatatagcttggctgtttctgtctttccaaaatgtcaaaatttgtctaggattaatggttctctaaatcaataggatttcatgtttataaatggtttayggttccactggttataaaatgttatgagctcatgcattatcatcaacgctgagcctttactgaaatctactgacatttagtctggcatccagaccagacatggaaggaggacagagcggaatcctcccaaggcctggcccagaacgcagaggtcccaaggagggacagggtgagtgggaagggaagcagaactcctcaatgcagagatcatcacagaaaaacgatgcatggaccgggggtcctatcccagctgccaagcagacctgttaggactccaagttagaagatcaaatgtggtccttttcaaagacatggagacgagagggctctagacaagttgacagcaattttcggagaaatgctgtaagaaataacatagttcaaaaatcatctttaacaccatcttctaatgcaaacattatcactgcttggcaaatgtgcttccacattggctctgtgcttgcacgccatggcttgagtgatggaattttacttctgtgttgtctttactgaacactccccacgcttctcccaaagaaactgtggttagtaatggcrgagtaccrttcaatggtgttgactccatgaacacactattttccccagcgttgggcactatggcccttatcagattttcagacagataagcttttacaaggagaatgtcagccaaggtcatttccttccagaattgttttaggtgggagatcagagaaatagatttctctgatcttgtgatacattgcacaggaacggaccttgcgtgcacttggtatagatgtactaaggtgacccctgcccactcatacttttggttttctgttttactccatgaggcccatgtgaacagactgtggacaaacaatggggttattcatatttcacatttttcatttccacaaatacatacaccaactgtgcacattaacacaatattaaagattcacctacagaagcaagtaagttattttccaaaggaagtgagcctccttgaactatttcacgggagcacagagctaaaacatagtatatcgaattgctattattaaaccataaaattacattacaaacacacactgatcatgcccaaatcttgctgacactaagagggatcttcatatggaaaagatcaaatgctaaagtcttcactctctctcttttctagtgtggagctggattttaagcagcaagaagacaaactccagccggttctaagaaaactccaccctattgaggaaactcaggtcatamcttcgccttactctcaggagacttactcctcaactcccaagcaaaaatccaaaactgaatctaaaaagcacggaagatggaaactctggttcctttaacactcacggtgtctggagtctcgaggccgtctttagaacccactggagtttaagtcaatacttttccaaaatgaataggatcgagggaactgtggtgcccattcaggcacctcccacttctcgccctgcgtaccaaaaaggcctttgtaccaatagataattaacagaagcaaggtattctgtgtcactccttgccagctgttctttgcagttcactgatgtgggatgtaaaatctgaaatgaaacttacgtagtcaaagatgataagtaaaaattttcccccacccccgatctgcaagtaatacattatcaacctgcgagatggcaggctgtcaccctgtacacagctataactcataattattttcaagccttgattttttttttaaataatgagaagaaaaagcaagccttatgtttgcgaaggacttcatttttatgtttcattttgcaaataagcagggggcgagtgcaattttcagcacatcaaattccggagaaagcacaattttttcaagtggtcggagaccatgaataatctctaaaatgtgactatatgtatatttgccttcatgtgctatagcgctaagccaagtgaccacatctcagtgtcacaacgacacctcaaatttagcatcctcttcatctccagacttacgacatgtttactgctcattttccaaatggccagcagccaggagtcccccaaagtcaggatatgcctttaatcactgcaagtagacagggtcagagctattggacactaagttttcttagatctcatttttaatcttttggtacccaaaggccaaataatacattctggcaagaatctgagaacatacatagagatacacgatggataatccacccaccaataaatcacaggcattctgtgccatggcagacagtgtttttgtggatcgatcctccgagacactgttagccatggtaagtgcagccagacgttatgtacaattcgttatgctttgtattaatggtggaagccctgaccatctcaaagagaaacagtgcgtttagtttagctgctaccaagggacaatgtcgcctacatttaacctattagtaagttgtactaaacaacatacttaggggaaagctgtgaatcaaatgtttttaggtattttttaaatcaacagtaacacttagagttctctcttgattacacattgcaatgtaaatcttagttcctttattttttcactcatttctttgcacctttgcaagtatctttttatagaaatcaaatcccctagtctattaatgactttgtctatcaattttttgattttcacaataggaagtagggatcttactttgcctttttttttttttttgtacaacttaaattttgaatagtttgtgagcatacaggaaaacctagtcttgaagtttctgtccagcagtttcacatctagtggagtgctgacatgcacacctcattgactagatgccaaacacacagtggctaaccttggtaaaaggatctcacctgcttttgtcagattggagctgcttcttgccatgtattttcctcctgactcaacagcaaatctgttttagttctaagtgttttgattctacaaggacctagtgatcagtaaccagatcgggccttgaaaaaaaaatgaagagtatgtcgtgtaaacattcttcgggggccaaacaacactgcagttgtatgctttaatttaaaacacacatgtgcacacacacatcctctgcggaaacactatatgaagttcgaatccctgaatatcaataaaaggaactgagaaatattttggtgcaagaacaatgaggaagttgatcctgtaacatgaaggaagtgtaactgtttcacgtagactaaatatttaaaaatgggtttcatgttttttatactgtttttaactaaagttataaaaatgtttccaacaagttctctctccttatgttttaagaatcccaactatctcagtaaattgaaataagggtattagcagttttctaattagtaacacaaatctgtctaaacaagaggacatcctagtacacaaaataatgtcactgtttcacaccagtctagaccaaaaaaaaataaaattgaaatgttcagagtcaaaaaggaacttctgaagataaattaattcatccctaaaaattaaagtgtgttcaaaatagaaaaactattgtcaaaatcatttcatagtttaattgcaacacgtcactaacagatggtgattcttctcttggaaagattcaagtaaaaactctgatacaaaagcaaggtaaaacgcacagggttcccttatgtagatgtacacatggcattgcatatagagattaaattattatacttgtcgttaagttctttattaatttttaaataaaaaaatcaaagatgttttatgtggctattaaacttatttcatggcctcaaaaattggggaacataaaagtaatctaagaaaataataataaaggaagaatgtttgggccgataggcatttcatccggtctgcagaagacaagagcatcgtaaggcctgggcctgacccaccagccagagctggcctggcttggggagggaagggactgacgcttgcccacctatgcaccctggcatggagtttcaccaccggaacacatggtggcattttaggatgcacacaggctcatagcaggaggtatatgaggtttaattcttaacctcagaagaaatggctaaatacattgagtgttgccacagtacactgtggcatgtaaatcttgcctccatggcccaggggaggtagcttctctctagatcttccattgagcacatccccagcctcaagggatcagccgcctccttcctttcttcttcccctccctagtgggagataggctgagcgcctacctctcctgctgacactagcctaatactaacccatctgcacacgtgggctggtgtttgcctcacctggacggcctaggagaggagaggccacaatgctttttcccagtatctgcaaccacagagtccatgtgcaagggagagggcactgcagaccgacactcaaggctcctgctaccatcgcatgttcttcagggagaagaaggggattcctcttctgacacatgcagaaagggaaggaaggcccaatgcacagcccagagcagacagagggagggttctgtctcattctataatcatttctgagccaactattggtgctgcctcaaaggtcctgttctacagacacccagatacaatgaagggtgcccaccagtcactctacaagtgtgcaactcacttccaagaagcagaagtcctgtagtcctgcatctgctccttcaatctccgaccctccagcagaagataaatggggaggggctcaaagtatgggaaaaccttgctaccttggaaacaacttaggcagttggcagcatttcccatgtaccctgagaggcagttagttatctacagccacagagatctgagatgtggctggactactgggtgtaaatggtgtcacagtcatggcccagcctcaggcagaccaactccaacctataaacagtcacaaggaggatggcctgcaacactgttttccttggaaaccacatgggcatatcagaaccaagatacacaactcttaattaaaactgtgaagacagaccatcaaatactggcctttcctagaagacagcaagaaaaggaaacaagaaagaggcatgaacttttctatgtcatggtgttagtaacaccatggcctgtttagaaaacctgtcactggtggactcattccttagcatttttatcagcaagtgaaagttgatttcattatgaatcagggcagtttggctgcagcagtgtcacctaaagatcacagcagctgcttcccacaccagcacgtcttctttgacctacagaaactctatcactagcatatttgcaggcactgcatgtgcagccactttatttactgaaagtaaacaactctgtggtacaaagatcagaaagaacatccatttcatgaactggcataaagtcatcatgctacagtggatcctatacattttggtcaatgacaaggtcattttaagttgcgcaaaaattaacttaaggcagtctggttttgcaaatatctttgctgtttggtatgaatatgtaaggattgcagagcatattgtgcccattcaacaatgtggtttttacttcttctgcagtaaacccatagctagtaaccaaccttgaaaaaataccagggtcacaggaatatgaaaacaaacctaaaattgctgtagctgccccaaagaaaaatgaacttataaaaccattggtgcacacacacacgttaggatgattttctgaaagcaggtaggtttattagcaaacagtacaattatagacatttttatgatgactatacaaaacccagacactgtccatttgaaacacaacatttttttgcagatgattttaaaatcatttttaaaacacattcatacttaaactctattataatgaacatctcaaaatgaatgctcatgcatggggatataacatctttgtgaaaatatttggttatgagtcttgggtaaaaggcactattcactgggaaaccaattctattaataccattttccaaatgaaggagcatgtcaggcccttatcaatcacccatgctcagagaaagcactgggttttcaccaacagcaaattccccaccaaagatgctgttgtcacaatgaaacacaccctccaccatcccatcaatgtccccctgagacagtgtttagagtggaaacaaaataacttccatcacttgtgtctagggagtcaggatgctccagtggtgacaagagttaagtggagaatccaggcaaaatcttccccttccctacgcccacttctgtcaatgttcaaagggaatttttccttaaaagaagcccacattttcattttcatgaattagtaatttccaatcccctcgtgtgtatccaggccaaagaaaaatctttagaagtccttctcactcgattacatttttaaaggacccattaaaagaatgtaaatctgatcatttgaaagaagcaacagcagcgcgtatcacaggagacggaaatgttactcatttcaacagctctcatctcagcctggagtgcttcttactctaggaaaaacacacacccaatggctggccagcccacctgcacacaacacaacagcacctatcccagccgcggtcacctgctcagatccgtgtgtgatgaggaaaaatgctgcttaatgctgagggcttagaaagcttctcaaaaacgaaggctgaaataaatcctgaagtctgacttaatataaaaataagtatttcactccatgcttctacagcatcagactacatcagagtaaagataaaatgacctttttgttctgtggcaaggttattgcaacgcttctgtctctgggcatgtgctaggtattcacatggtctacaattctgcaactgccaaatagagttgttttggttttttcttaaggatgtaatacttcggatcatagcacattattatcctaggcacgagacgcattccaatcacccatttcaaatataatcaactaaagcaaacaatatacaactgactgcaaagtcgagtttttgtaaaatcccacagataaagaaaagccttatattgcatatcccaatttatctaattaagtgtgaagttccccagttttctattccttacattaatagggggaagctgtcagggcataatcacattcccagttaatgccttattccgatggaaagaggccacatttctagtactgttgttgacaacatcatggaataaatcattaagtaaagtatattaatttcagagttctttttaatcactttaatttttaaaaactcattttcagtgattacttagaatttttaagctgattcatagttacataatttccactatatttagcaaaaatgagtaacacataaaggctgaaatc

SEQ ID NO: 6906 - DNA, 14970 bp, Homo sapiens
ctgcactcacatgttcatcacaccactattcataatagcaaagatatgaaatcaacataggtgctcatcagtgaacaaatggataaagaaaatattgtatatatacacaatgggatattattcagccattaaagaggaatgaaatcatgtaatttgcagcaatgtagttggaactggagaccattatgttaaatgcaataagccaggcacagaatgacaaatactgcatgttcttactgaaatgtgggagctaaaaaactttatctcatggacattgagaatagaataatagataccagagactgggaaggggggtggtgggaagatgagagttaggttatgggtacaaacatgccgttaaataaaaaaaataagttctaatgtttgatagccgactagggtgactatacttagcaacaatattatgtatattttaaagtaactagaagagaggactttaaatgataccaacacataaaaatgataaacactgaaggtgatacataccccaattaccctgacttgatcattaaacattctttgcacgtaacaaacactcacatgcaactcataaatatgtaaattattatacatcaataaaaagggggaaaatattgtggggcttggggaagccaagaacataaggagatgttaggaattgtttggcttaggtcagtaattgtgatggattgttgaatgtcagaggagataaagttctggaaaaagccaacattgaaatttcccctggccgggcgtggtggctcacgcctgtaatcccagaactttggcaggccaaggcgggcagatcacctgagatcaggagttcgagaccagcctggccaacatggtggaaccccatctctactaaaaatacaaaaattagccaggcgtggtggtgcgtgcctgtaatcccagctactcgagaggctgaggcgaatcacttgaaccagggaggtggaggttgcagtaagccaggatctttccactgcactccagcctgaaaaaaagagtttcccctctgatcactttggttaacgattttagttaataattataatagaaactagcatttacttattactgccaggcattattctaaggacatttcacgtattctctcatttcatcctcccaacaccacaataaaccagtagttgtattattcccaatttacaaaaccgaagcagagacattcaataattttccccagagtttcatagcataaaggtggaagctgatttcaaatccagatagacagacatcactgcccatgcttctaatcatgtattcatttagtcaacaactacttttggaatgcttgccataccatgcaatgtgcaggttgttttgcagggactggagattcagcaatgattcagactaaaatcccctgccctgtcgaggctaaataactgctccttacagtggcctgtggatcatattggtataaggcagagcaaagatgggttaatatggtaatcacaaggcagggagctttgtaaatgtgtcctcctaggagttgtgctcccttgatgccatcagtacattccacaaagaggaagttcttctaactcactacgcagctgggcttggctcttactcaagagcattttggggtgaaaatatctaagtttaccagcccttgtgcaaatctgagatgaaggactacattaaaagtaaaattcaccttagcaggaagtggggtttgctattctgtgtatatctttaacagtatctgctgaaaagaacccttttgttaaataattgtattacaagtccccaacttaatcttttcgaatatgaaataagagagggacagtgcacaagagcaatgtccccagacccatctttaagtgaagcaccaggccgatgaaacatccctctctgctgccttctttctctgatcacaactcagctccggaggaaaaagagtcctctaaagtataataaaaagaaaaaaagaaaaagagtcctgccaatttcactttctagtttcactttcccttttgtaacgtcagctgaagggaaacaaacaaaaaggaaccagaggccacttgtatatataggtctcttcagcatttattggtggcagaagaggaagatttctgaagagtgcagctgcctgaaccgagccctgccgaacagctgagaattgcactgcaaccatgaggtaaatattttcccttcgtattcggtagtgctgttgagtcatcttgtccaatgcaaatcctgagaagctatgttcccaaagagggccagctccattttagtgtttgtttatagccttactatgcctctacctctgttggttgtaaatctgtcttaccaatggtggtttgttccctcctgaacaattttctgcttcacactggcaagcttcctaaattcatctccagaactgcacgcctggggagttgagttgcaatcagagaaagaaggcagcagagagggatgatgtttcatcggcctggtgcttcacttaaagatgggtctgggggcattgctcttgtgcactgaccctgtcttatttcatatttgaaaggattaagttggggacttgtaatacaattatttaacaaaagggttcttttcagcagatactgttaaagatatacacagaatagcaaaccccacttcctgcaaaggtgaattttacttttaatgtagttcttcatctcagatttgcacaagggctggtaaacttaaatattttcaccccaaaatgcctcctgagtatgaattagagatggagtgcttggagaaaatagttctgttctcacctctaacattcccttctatccccaaaacatgagactgccctggagaggaagtgttagctcattgaataggaagggaaatattttctccagtttgaaggtggggtggccggacctggttgcctaaccctcatcctgggagctctggaatcccgtgttaccaacccctgtgcttacttcctatgagacaccttgccttctgtctgtgaggttcctgatttctcttcttgaaacgatattatttcctgctagtctaaatgttctgcctgatttcaaaaaaaaaaaaaaaagatttgagatatttacagatttcttttttttgtagtcacccagaatctatagaacccttttcttatttcttagaattttagcatggtcttatcttagaatttttcccattacaatacagacccatctgtcctttctttccttaattctttatctattgtgactttcactgggcattgcccttgtgccctaagacagtggttctcaaaattgagcatgcataaaaattgcctggacagcttattaaggacagagtcctagggttgactccccagagattctcattaagtgggtctgggttagagtctgaggatgtgtgtttctaaaaggctcctcagtgattctgagactgcggtggtagcattagttctgagcctggttgataatgtcactgtggctttcatccagataagaggcaaaggaagaaattgttgttgttgtgtatacaactggaacttctataggaatcgggagaataggtcctcacaagccagagcccaggaagcaagtgtctggcatcagcttctctaacttaccagtggaaataaaaacccaaaatcaagcagtgaagttggatgccttttaaatggctgctcaaagggcttttacctaagtgtgtatattaaatatctctatcctgcaaatgcacaatagactttatgttttatatggtggagataacctcaattctatttactctctctgtttcttttgtaaaatgagaaaggagctaaggagtttatgtgttaagggaatgagctcccaaactcaactggaagttggaaatagaattgagagggagcaaggaagctatagtgagtcttcaggtgttaggatgcgtgctgcacatgcttggggtctgagagtggtcatattctgtaggactcaccatattctgtaatgaatgcagtagagagtgtgactgagatgcacatggagaaaacacagggtctgagccctccaagctccccagtgtcctgttctgatcctcctggggtcactacagtcctacccatggtcctgtgaagcactctagtaactttaaatcagttcctgctcacctctgtttcttggaacaaatggagacttaactatcccaggcagaataaacaaacaaacaaacaaaaataggatggaaaataggcaggagtttataggaaggacccgccttccattcaaagctccaaataggtcttagcaaagagccaggttgtctaagtcccttgatgtaactaaccccaggcgcgggagccccggagagtgcttggcttggtatcaggcatcctaatggcagatgcattcccgttgaaaagctcatgtccaaacagatctgtttttattcttagtgaggttacaggaagattcccaatcaaaatgggagtgggaagcagtggtataaaaagtgggagagagaggggcagttagaaagaggggtcacataatcttctatctagacatatgtttcataagtgatcctgccacattgcatgacattccagatatctattggttgtataagaagccatactatttagaaatacagctcctgatacaagggttgctgtatagataccacgaaaaaaaaatttaaataagaaaaggcaacattacagagactccaatacacagacagtgttgagaaataatttggggcatagaatactatttatctccaaagtaattcgaaatacaggcttttgctcatttgtctgttctctgggttttttcggggtttttttgttgttgttttgttttgttttttggtttggttgattttggtttatttatttattttgaggaccaacactaaagggaatggaaaatctttccaggagagtcataagggtaccctaaagaaaaaagagctctttctataagaaaaggagctagtggccttgtgagccttccctgtagctgcacttcttgccccttattataaaagcaaaacccagaagagaaaaataaaatttcaaaaaaaaaattaaaacaataaagtacaaaattattaatagagcaactcaatgagatgtgttaagaacagaaatcaccagtttaagaaatagaggtatgggggggaggggaggaaaaaaaattacattttattccaaaataaatgtttaagacattgctaacataaataatacttgaaattaaatgagagaataatacaaaagcagataaaatgagtaaaaattaagaatggttgaaaataagattcaaatggttaaaatggaaaaattcacagaaaaaaatgagaatgtagcatgttaaagtaataaaccaatacaaaataaaaccaatctgataaaagctcagaaagtttgaatagacaaaataaatgaaggatatattaaaagctgaaatagacagaaaatcgaaagtgataaagatttctttaaaggcaaatgaaggagaactaaggaattaagaatatcaaagataaaatgaagctgcatttcggagggatgagaaattaaaatcaccatggcaaaacattaaaagaataaaaaattataaagctgaaattttcaaagtacaaaagtaaagctagggaagaatgaagaacagaaacagcaatgaaaaagacttacttctttaaaactacataaataaaaccaagcctccacagagaccctcgaaagcagagagggcagagctgtttaacaaaaactgtcttattcatgaaaacctagccacagactcagagaacaacccactgccctcgccctaattcttctgctgcccacagtccctaaactcctgctaccacatgcaggaattaacaataaggaaaaacatattatagaaagaaaagaaggggagtttctttgatttgtgttaacagcctttaggaggaggagcattttatttgccatgctcccatttcttgacatataaatctgtgtctcaaagtccatctttgtgtttttccctacagtgagaacaataagaattccttggagagcagcctacggcaactaaaatgccatttcacctggaacttgatggagggagaaaactccttggatgattttgaagacaaagtattttaccggactgagtttcagaatcgtgaattcaaagccacaatgtgcaacctactggcctatctaaagcacctcaaagggcaaaacgaggcagccctggaatgcttacgtaaagctgaagmgttaatccagcaagagcatgctgaccaggcagaaatcagaagtctggtcacctggggaaactatgcctgggtctactatcacatgggccgactctcagacgttcagatttatgtagacaaggtgaracatgtctgtgagaagttttccagtccctatagaattgagagtccagagcttgactgtgaggaagggtggacacsgttaaagtgtggaggaaaccaaaatgaaagagcgaaggtgtgctttgagaaggctctggaaaagaagccaaagaacccagaattcacctctggactggcaatagcaagctaccgtctggacaactggccaccatctcakaacgccattgaccctctgaggcaagccattcggctgaatcctgacaaccagtaccttaaagtcctcctggctctgaagcttcataagatgcgtgaagaaggtgaagaggaaggtgaaggagagaagttagttgaagaagccttggagaaagccccaggtgtaacagatgtwcttcgcagtgcagccaagttttatcgaagaaaagatgagccagacaaagcgattgaactgcttaaaaaggctttagaatacataccaaacaatgcctacctgcattgccaaattgggtgctgctatagggcaaaagtcttccaagyaatgaatctaagagagaatggaatgtrtgggaaaagaaagttactggaactaataggacacgctgtggctcatctgaagaaagctgatgaggccaatgataatctcttccgtgtctgttccattcttgccagcctccatgctctagcagatcagtatgaagamgcagagtattacttccaaaaggaattcagtaaagagcttactcctgtagcgaaacaactgctccatctgcggtatggcaactttcagctgtaccaaatgaagtgtgaagacaaggccatccaccactttatagagggtgtaaaaataaaccagaaatcaagggagaaagaaaagatgaaagacaaactgcaaaaaattgccaaaatgcgactttctaaaaatggagcagattctgaggctttgcatgtcttggcattccttcaggagctgaatgaaaaaatgcaacaagcagatgaagactctgagaggggtttggagtctggaagcctcatcccttcagcatcaagctggaatggggaatgaagaatagagatgtggtgcccactaggctactgctgaaagggagctgaaattcctccaccaagttggtattcaaaatatgtaatgactggtatggcaaaagattggactaagacactggccataccactggacagggttatgttaacacctgaattgctgggtcttgagagagcccaaggagttctgggagagggaccagattggggggtaggtccacgggcttggtgatagaattatttctcgattgacttcttgagtgcaatttgaactgtaacatttgcttagtcacctttagtggagtaatccactgggcttgtttctatatttatataaagcagccaaatccttcatgtaatattgaagtccatttttgcaatgttgttccatacttggagtcattttgcatcccatagaggttagtcctgcatagccagtaatgtgctaagttcatccaaaagctgggggaccaaagtctaaatagggctcagtatcccccatcgcttatctctgcctccttcctcctccttcccagtctatcatcaaccttgagtattctacacaatgtgaattcaagtgcctgattaattgaggtggcaacatagtttgagacgagggcagagaacaggaagatacatagctagaagcgacgggtacaaaaagcaatgtgtacaagaagactttcagcaagtatacagagagttcacctctactctgccctcctcatagtcataatgtagcaagtaaagaatgagaatggattctgtacaatacactagaaaccaacataatgtatttctttaaaacctgtgtgaaaaaataaatgttccaccagtagggataggggaaaagtaaccaaaagagagaaagagaaaggaatgctggtttatctttgtagattgtaatcgaatggagaaatttgcagtattttagccactattaggaattttttttttttgtaaaatgaagactgaactctgttcaaatgctttcatgaacctggtttgagacggtaggaaagcaacaaaacgtgggaacctggtgactaagggcctggtgcaaggacttgggaaatgtcattgataatagatggtggggttttcccccctttagaaatgttggatattaagtgatataaacacttcttttaactccgaaaatcttctgagaaatcacaaaattcacggtatgcttggaacgattgagattttctaggtagatgctgaatagcctagacatcaaagttggtgtgaaccaaaatagagtcagctgacccagcatcagccacactctgggttggaaaatgtttgcctgttggaattaatttaagcttaagtatatatcaacattattttattgtgcaattaaaacaatacaaattcatggttttttaaagttaaaaattctaaccactgtaacaacagtttttgtgttattttctgtattaaacatcttgttgcacgcatttgaggtcatcagggtgcaaaatttgtattcctgaaaatgtcatatattttcattaataaataacctaaatatgataaaacataaagcagtgttctggttcatctggaattttgctgtactttaaatctttcagactcagctactgataaatgaaacgttacacaggtgtgaaccaaatccaaataacctcgactggtctactatcataatcacctgaacagaacaaaactttttcctcagctttaagagtccagggcttcggataacagctgccatctgccacctgctaccattgacctacgtgaacacagacattctgtctccaccttgatggtgggtgggctgctccccttttctttgttaaattttgtgctttcatcacattttctctattctgacctctgttatgagaaataaaagtcactgattccattttatgccccatcctggacgcaatccaaatgcatgttaaagagtcttccctattaagtaaagaataggaagagacaagaaggcccaaaatctctattatttttcaagaggcctctaatggaaaacacaaatcacaccaactgcaaaggtaaactcatttcattggatcaaaatggacaagtgtatgtttcaggggaagatctagctcaccttgatctgagtaaattaggactacatctggtgcctgggaaggaacaccacacgtattctgagtggaaggttaaaatggacaggtatgccgaccttgagagaggacccttggtacctgtgtgtgctaaagatggatgtatgtaatcttgtccttgcatgtcatgcctccagtcccttgctggaacaggacccttagtgggaaaacagcaagaagggtagaaaagggaaacataacatattacacttaatatgagggcttaaagttaacaaatgattggaaaacaatgaaaattatgtacatagctccagtttcctgaaatttcactatccaagaataacaaatgaagtcacattaattgggcttgacttgtaattcccagccttttagccacatttcccggggcaggacatttgactcccttcatatattcatccaacacggcaagcccctagtagatgtctcctatgtgctcatgaacccgtttatcagagttatcggaccacatctgctacttatgtagcttcaacacccatatccatcaatgaccattgcccctaaaactgccttcaatacatttcacattctctgtatttgattgccaccttgagagtactaatatctctgccaacaatgttttcaagtgtgttagtgccagtgaaagagtgagaagaattcctcttatctctgtgttggttccaagtagttcttatttatttctctgcctcagagtcctcagtgaaaaagattcatcacttctgcttgtctttctccatagagctcagacacagtccctggggacagctgaccttgagtcatgctgcactttcaccttccttcataccctatgtcaattgacatatccaatacaactggatccagtgcaactggaagactggaagcattagaattctgattataacacagataggccttgtgttaggatccctaccatacgtgcaatcaaccttggatgccaatctgagggttgcagtttgcaacctacatttgccctattgccctttttggaaaagggactaacttagactaatatgtaagaaattttccccatgattaatagtgcagctacctcattgctgattatctacaccttctagggaggctgcaaagagggaaacccactaaaatccttagatgtacctaggtgcatgcacttgtaagagaggcattctcagctctacatggggcctcccttcagctgctttacatacaggacttaagactagagaagagaccagaggcaggatttgttggaagcctgtggaaacaaatcccaaacagttctgcttctcctctggttctctgtaggctgctgttgaaaaggaggctaccaaacaggtaaacgatacaaatagaccccagagccttggtttatgtctcacttgttttggaaacataatgagtcatagtttgtgttatttctgagtaaaatgtaaaaatatatagtaaattctgccctgaacctagaaattcctgaaacccttctagagatctggaaattggccccagtgtgtttatacagatataatctaattaaaatatttgaaaagtctttctttacctttccagaatcctggatatcccaagtaaatgagcctatttatgttctgcttttgattcacagatattacagagcaaaggcactgtgatataaaaccactgagcacacattttcctttctcatttttaaattaaacttactaatttgtcatcaagcactacatttaaaaactcaaacctggctgggcgtggtggctcaagcctaaaatcccagcactttgggaggccaaggagggtagatcacctgaggtcaggagttccagaccagcctgatcaatatggtgaaaccccatctctaccaaaaaaaatacaaaaaaaaattaaccaggcatggcggtgtgtgcctgtaatcccagctactcaggaggttgaggcaggagaatctcatgaacctgggaggtggtagttgcagtgagatggtaccactgcactccagcctgggtgacagaggtagaccctgtctcaaaaaaaaaaaaaaaaaaaaaaaccctcaaacctacttgtacgttttttgcatttagtgaaacacctacataagttggagctttaaaacatatgtataaaactttgtaatatatcttctaattgttgattaaggaaaactagagttcactagaatatttaaatagaaacattttaaataatgattaaggcttttaggttatggaaaagagttgatttgtctaggtgttaaaaaggaaattattatttccactagcaatgtatgagaaatactgttttcagcatcttcaccaatactgaatgttaccagtctttaatttttgtcaatctgatgagtgcatgcatatatttccaaaaaaggcactggcgtatagatcacagaaaaataaaatgttcaagtgtggaatctgtatgacggaaatcctctccacacccagaatgctagttttctctcctctctctctgtctgtccccaccatctctctcttcctttttctctccttctttctcacttttatcttccctttacgtcttcttccttcaagtttctctttctagagatgactttgcgtctctgtgcatgaagtggaaaacatgcctaccaggttatttatctcttctcctaataattcaacaaaggccaggtgcagtggctcacacctgtaatcgccacactttgggaggctgaggtgagcggattgtttgagcccaggagttcgagaccagcctggacagcatggtgaaaccctatctctacaaaaaatacaaaacttagctgggcttggtggcatgcacctgtagtcccatctacttgggatgctgaggtaggaggaacacttgagcccaggaggtgggggcttcagtgagctgagatcgtgccactgcactacagcctgggcaacacagtgagatgagaccctgtctcaaaaaataaataataataataattcaataaagactttctagaatcactttcttctgatcaaaattccaaagaaatatctgtttgtctcatttcaagtcaatatccattaccaatagaatccagttgactgaggcgggcggatcacgaggtcaggagatcgagaccctcctggctaacacggtgaaaccccatctctactaaaaaatacaaaaaattagacaggcgtggtggcgggcacctgtagtcccagctactcgggaggctgaggcaggagaatggcgtgaacctgggaggcagagcttgcagtgagccgagattgcaccactgctctccaggctgggtgacacagcaagactccctctcaaaaaaaaaaaataataataataataatccagttgaccaagagaatgagatcatattccagagaaagcaggggcttagagtgcatgctttctgcaggaatgagagcaaattatccaagaaggagacatgggaggagggagaaaatgactggcagaggacatggcttgcatacctagaatacactctagctttcaatcacacgagcacacacttttgtgtgtagtccagcactgtcttacatgttattacctgtagaatatctagagttctaactagaccagtatttctcagactttaatgtgcagtgcctactttcatgtgcacaatcacctgaggatcttgttaaaatgtagactatgattcagtagatctgggtggagcctgagactctgtatttctcacaagctctcaggtcaaaacaaggcctgtagtctgtaaactacaccttgaatagcagaggtatagactgaactgcaaccaattcaatctggttccatttttcagtttatcctttagtcagaaatgaagatcataccagcacattttccttcctacagccttctctctctttcagtaactcatctcttgagatctcagataagaaaatctgtattacctcaaaaataagtatgtttaatgtaaaatggtgcagccactttggaaaatagttggacagttcttcaaatggttaaacatagttaccatatgacccagcaattccattcctagatacatatgtaagaaaaaggaaaacatgaaaacataggttcacacaaaacttgtgcatgaatgttcatagctgtattattcacgatggccaaaaagtggacccatcaactgatgaattgataaattaaatatggtagagccacataatggaatattatttggaaacaaaaataagtgaagtacttactgatacatgatacaacacagatgaaccttgaaaacatgcaaagtgacaaaaggcaatttaaaaagtcacatattgtatgattctgtttatatgaaatgtggaacggaggcaaatttatagacacagaaaatagattagcagttgcctaaggctaggggagggggttgtgacgatgggagatgacagcttgagaatgttctataattgattgtggtgctggttgcataactgtgaatataatgaaagctattgaattgtatactttaaatgagtggattatatgatatgtgaattatattttattatagctgttaaaaatgggcactcttattccaaatataataaagaaaatttttcttttgttatctatttttacttctaagtttgttttcattgtgttgtatccttattagtagcattttgaatactgtcattgctttcacattcggtagatatgttagataagttatgtattctattttctgagttgggtgtgctatgaaaatctggtcccatctgattttatatttaaatactcatacgcaggaaccttactgattggcaaattggcacaaagaaagagtccaaatacagaagagaatttgactccatatgtaagttcaaatctgcatgtgtacaagtttaagaataatgtgaatttatgcccgagcgcagtggcttacgcctctaatcccaacactttgggaggccaaggcgggtggatcacgaggtttagagatcgagaccatcctggccaacatggtgaaaccccatctctactaaaaatacaaaaattaggtgggtatggtggtgggtacctgcagtcccaactattcgggaggctgaggcaggtgaatttcttgaacccaggaggtgaaggttgcagtgagccgagattgtgccactgcactccagcctggctacagagcgagactctgtcaaaaagaaaaaaaagaatagtatgaatttcttaatgatgcagaatgttattcagtcaccatgtgcaactgttgcaaatactgctaattcatgagtactttttgagccaggaattagaacaaaaagaaaagcaagaaaatggacaataggtcctactgtactggaaaaataattattcattacataagaatctattgcattctggtgaaagacagtctttgagcagtttgctgaatttgccttttctctgatctttattgcta

SEQ ID NO: 6907 - DNA, 13524 bp, Homo sapiens
gttcactactggacacctttcctcttctgcttcttggtggagagggcctatttgagcccctccagtaaggcaggcactgtactagttacttcacttgtgttgttctgcaggtaggcagagctgaggaaatgaggctcagaattctaaggacttgcccaagagcaaacagcacttggggtgtttgtaccttaacccaaattcatcaaactccaatgcaccaggcctccttaaccgccccaagagttctttcctcccttcactccacatttactggagtatatagtaggtcccgcccagtgcagcctgccagtgatagatgattaaaaacccaggccaccagcagtgcccagtctagacaagaaaatggaatgggtgccgatgggtttgcaggaagaagtctacttggagaactcatttgaggcaggcagtcagaaggtgctctagagaggaggtgatgcttaagttgaatcctggaagaggtgtaggtatttgtcaagtagttaagaggaggggaagacatcccaggcagagagcacagcttgagcaaaggctcaaatggaggcacggtgaagaacttcccacagtcaaagtgtttggaaaaacagatgaagctagagaagtcacagagccaaatagaaagggcatcaaatggcaggagtaggtttagactaaactgaggagagccagggaagctatgaagactttaagcaggggaatgatcagatttgccctctagaaaaatgttagaaagggccgggcgtggtggctcatgcctgtaatcccaccagcactttgggaggctgaggcaggtggatcatgaggtcaggagttcaagaccagcctggccaagatggtgaaaccccatctctactaaaaatacaaaaattagctgggcatggtggcgggtgcctgtaatcccagctacttggggggctgaggcagagaattgcttcaacctgggaggcaaaggttgcagtgagctgagatcgcatcactgcactccagcctgggagacagagtgagactccatctcaaaaaaaaagaaaagaaaaataaaaatgttagaaagatctgcattgggctgtaatgtagagaatggatgggaggggcaagactagaaactgagacccgaaacgaggccattggagaacttctgataagacttgaaggtggcctgacctagggctgtgagagtgtggaaacaaggaagagcctagttctagagaaacttagaaagtagaatagaatccaatctgttttttccccaaccatccctcactttaatccaagctcttactctgacatttcagggcttccctcatgggctcctgtgatgtgggatgtgaggcagagggaaggatgaatcgcttacttgtacccgggcaaagaaagatggcctgtcatccagaaaggacaaattcacgagagtgccagagggacctgcaacttaagctgccccctcccactccaaaaatcaaaaaggcagtttagggctttggtggtgaagagtcaacagaaaaaggggaagagcggcaactgggcctgaggaagttttctgggagaattaagatgagcagaggtgcctgaggaattgattaggcaacatgcatgggggaaaaagagttaagaaatactgccatggagcatgtaagaatgctaatgaggaatgtgtggggatttttgtttgccaaatttttgtttgtttgtttgtttctgagacagagtttcgctctttcgcccagtctggagtgcagtggcgcgatctcagctcactgcaacctccgccttccagtttcaagcgattctcctgcctcagcctccccagtagctgggattacaggcacctgctaccacgcctggctaatttttgtatttttggtagagacggggtttcaccatgttggccaggctgacattgaactcctgatctcgtgatccgcccgccttggcctcccaaagtgctgggattacaggtgtgagccacgatgcccagcccgctgaattgtttcttggaacatggcagcattcaactatattatttgggtaacaactttctaagggttataattatgaacatcatgacccagaaatgccctgtggtgggatcatgaaatcacagaagctgaggattggacccttcagttccttctagaacattccatccagtagtctgacatggacagctcaccctattttggccagccatgagtgataaacgtttcgtcacactggattggcatgtgtacctctctgaagccattaaatggtcttgggtctactcttgaagttctacggggcaagcaaattcttccacgacaactcttaggctatttaaaggcagtattcatggactgccagagcctactttttatccattccttacagaaaggcagtacagagcagatggaagactgaggaactggattccgaagacctgggttcaaacatagacttattatttataatctgtatgactttgggtaaactacttgaaatgttgtttgaatgtgattaccattttgctatgtcccctcgtcaacttgacccctacccacagcctccaggtctctgccttgagctgctaagtggatgatggtgacacacacacatacatacacacacacacacacacacacactcacatttggggtctgctgacttagagatgcccaaaggtcactaggctgtgggacactgggctggagcacatggaaagggaagcatccggatccacatttgcatgctcagtagcacatctgcccctgaagacagctcctctcccttccacctcggggaaatggacacagtcttgggacctgggtgtccacactgggatctgagctgtgagaaagcagctcaaagtgcctgtttggcaaggatcttctttgttgggagctcctgactcaggggttctccagcatattcaagagttggaaaggctgtggtgggctccagtaatttttaagaaaaactccaggtgattcatgagaagaaatgccatgctggattttctttttttccctcccattgctgctaaaattccagaggcctggctcacctctcctccaaaggtcaagggtgggcagtgtcccaaaactgaagccaggagccaggatgcacctcaggcagaagtgtgttctttaatctcacctttccatgttctctccctccactatagaagaggatcccagggttgcatttgaaaaggggtcatcccatggtttttttggtcttgagccagagggctaaaagtaggtgtgatcccattagaaaatgtggcccaatatattttgagcactatagggtgcctctcccaagagggacctcactagggaccccagagggcccacacagaccttagctggtgacaattatggggggtgtgtgtgctaggcagtggaggtttggggcacggtgtccacagtctctgcattcttccatcattaccactaaccgtgtgatgacccatagagggagagaagaggcacagagggtaacaggaagcttaggggaaacagggtttttattaggagcacccaacatgtgaaactcagcggtgaagtaaaaggagggcaagtgtttcattggcttttgctcagagaatgtgaggggaatccctatgctcaaggaccttacagactagatagagtgactgccttacactaaagcatcacctcttccacacacaaatgcagaaagtgtgatgacagatgacagatgggcaagcctgggcagcccacgaagagcaaatgagtcagagcatgtcaggcttggagtgtattagcaaagagggaggcactgaacaggtgaaagggtcctccaaaggtgtccacatcttaatccctgggacctgtgactatattaactttcatgccaaaagggattctgtggatgtgattaaatgaaggaatctgagatggggagagtatcctgtatggcctgggtggggccagtgtaatcacaagggtccttatatgggggatacaggagggtcaagggcagagaagcagatgtgacaatgacagctctagtctgagagtcttccaagatggaggaagggactatgagccaaggaacacaggtggcctctaggagctggaggcaagaggaagtattgtctcctacacctccagaaggaatacagccctgaaagaaccttaattgtagcccactaagaagaattacgaacttctgacctccaaaatagtaagataataactgtgaattgctttaagccactaaatccatggtaatttgttacagcagaaacaggaagctaatacaggctcttctaggagtccaggttagtgaaaaggcaccaagcagctatagatttcgcaacattcaagtagggtttgggaagaaaaaaatggagggttttaaattacatatgcctttggttaccatatacagcacttttgaaataaagtgaaacaacctgagttgcccacgcaaatccctgaacggcagaggcaattaaactgtttttcaggcagccaggcatcaaaagtactttcctatttttcctttaaaattccatgccatcatctcacccactaaccaatgaagcaagaaactgagattttgtccttgggatgacaccttgctgcccccatcagatagtcacaaacctcatgagactggacttggtccttttcttctctcatacccaacaaggaactgagagcaactcccgtagcctctctaaaggacaaagcccattattgtggtgactgcctcttttatgaagggctgggatcaggttcagggtgtggcataacataaggttggattctgccctgagtgtggcaggcatccacaccaatgtgtccagcttcagaaatggcatgcaagatggtggccaaacagcctaagagttgcacgctaggtcccatcaagctgtgtcccagcacatcctggggaggaagccacagtcaggagagcttggctactcctggttggatatccttgggtgagctatgcacctaaaagcctcagtgttgtcagtgggattttgtagagtctaatttcactgtctagccaatgaccctgatgaaggcacagtaagtgtacacatgtatatccaaaaataattccccttaaggttgttctaagggtcacccttagtgcccttagtcaccatagcagcaaaggattcccactaacatctaaatcagatggtgtcagtgctctgtgccaaatcctctagtgctttctgaccttacccacgatccttgcattggcctatgaggcctaccatgagctgcttgccttcccccaccccatctcatctacttttccttactccttctatgccagccacacttttcttcctgctcctcctctaactcaagaggtcggcaaactttttaagggtcagtcagtatttactttctttcagctttttgggcaatgcagtcttcaatgccgtgactcagctctactgttgtactgcaatgccagtcacggacaatacgtacatgaatgagcacggctgtattcctatccaacaagctggggaccggattggactgcagcctgctgacccctgatctaactcttcagtcacacatctgcctccagtcctctgcacctgctgctcccctgacatacacatggctctctccctcacctcctgcaggtcttcattcaaatgtcaccctctcaggaagccctgcccaggccacactagcactgccaccctgcttttgctcttaacgctcattttggttattgtctgtcacccccaccccccaccgactagaataagggattttgtctgtttttttcaccagcgaattcccagctgccttgtatatagcagacattcaagaaatattaattaattgaataaatcagtcttgttacgaaatttaggaaaaggggagccatttcaaaaacaatatcccaaatgtaccctaacacaggataagggtttgcaatatctagaaagcccaggtcaccagattacatcataattagtgatgtcactgttgggaaaattctcagggtatcctctgatgtaggcctttcaggccttgaatccagtgggattgagaactttctaagagtggtgcggctcttgacaacatgtgggctccaccagcagcaatcatgggggatgggcccaccaagaaggtgggcaaccaggcccccctgcagacacaggccctccagactgcctctttaagggatggcccggcgaagcgggccgtgtgggtccgccatacgagttcagagccacaagaacctactgaatcaaaggcagccaaggagaggcccaagcaggaggtgaccaaagcagtggtcgtggacctgggcactggctactgtaaatgtggctttgccggcctgccaagacccacccacaagatctcaacaacggtgggcaagccctacatggagaccgccaagactggggataatcgcaaggagacattcgtggggcaggaactcaacaacacaaacgttcrtctcaagctggttaaccctctgcracatggcatcatcgtggactgggatacagtgcaggatatctgggaatatctcttccgacaagagatgaagatcsccccggaggagcatgcggtcttggtttcagacccgccactgagcccwcacaccaacagagagaaatatgctgaaatgctgtttgaagccttcaacacccctgcaatgcacatcgcctaccagtcgcgcctgtccatgtactcctatggaaggacctccggcctggtggtggaggtrggccatggcgtgtcctacgtggtccccatctacgagggttatcctttgcccagcatcaccggaaggctggactacgcgggctctgacctgacagcctacctgctgggcctgctgaacagtgcggggaacgaattcacccaggaccagatgggcatcgtggaggacatcaagaagaaatgctgctttgtggccctggatcccattgaggagaagaaagtccctctcagtgagcatacgatccgctacgtgctgccggatgggaaggagattcagctgtgccaggaacggttcctctgctcggagatgttcttcaagccatctctcatcaagtccatgcagctgggcctccacacccaaaccrtgtcctgccttaacaagtgtgacatcgccctcaaacgggacctcatggggaacatcctgctctgcgggggcagcacgatgctcagtggcttccctaaccgtctgcagaaggagctaagcagcatgtgtcccaatgacaccccgcaggtaaacgtgctgcctgaaagagacagtgccgtgtggaccggtggctccatcctggcctcacttcagggtttccaaccattgtgggtccaccgctttgagtacgaggaacacgggcctttcttcctctacagaaggtgcttctgaacrgcracgaggatggacactgcactggcagtgcctaccctcgacagggtgagcgcactcctacacacagggggtggagccggcgcttattcctgtagcattaaacacccctcatatgcccctccacagtgtgtttctctacttcctgacttcataagaaacaacttcacacgtgcagcatctgccttaaaatatacatttcccaaaacaaaagcaggagtagggggaggatgaacaaaaaagggcatgcattgtatgtggattgcttaaacattcacttgttctaaaattatgctgccccttattttgtgcattccccgctttaggaactactttacggttaaactctgcttggaagggggagtgcaatgaagattagagggtaaatgctgttggggcatataagcagttccctttccataaatgccaataggaagtatgctgtaacagtgcaaactcccacaaagcatcagtgtccatttcatacttcatcaacaaccctgagggactggaaagagctggcaaagctgtctgagccctgctttaacaggagtttcttttagttccaacagtcatttatgtctcagtaccagttcttactaagccatcacagcgactggctgctgaagcctagcatattacaagcaaggcatttgtatgtgccttaaagggcaactcttcagagaacaagtgctatacagatttcccattttaaaaactgaagtaagactgatcttgggttatcagcagagaggttagggattgaggccacagtcattctctagacacttcaagtagtagctgaccatctcccagcaggctggattctccatcagcctagaacacacacggttggagtctggggtgtgctgaggatagaggctgctggttctggggctgatgatatgggtctgtgggaggctgccctatgtgggtcattctaaccccactggggagcccaaagatacacagagaccctcagtagccagggaagcccttccagggcccagcgagctctctggtgttcctgcagggggagtttgtaatatgagcactttaaattggagattctttagaacagcctccaatacattctctgtcttgtctttaaagttcaaaatctgaacactagttggtgcacaaaacagaggatagaacatgggctctggactctgtggtttgaaacgcaattttgctaccacctaactgtgacttgagtttgtttgcttgcctgcaaaactgagtataaatgcctacctcacacagctgattaaaaaacagcgaaaaatatctgaataccagtatctagactcctgggggtcctcacaatagctagctagtatctttaggtttctacctcttatgcagaaggccagaagtctcttactatagtccttagccacacaggtactcaaaggcaggcattctgcatttagaggagagctggcacctccaccatctccagggagaagccctccagagctgctcactggttccaggcttgcctcgacagccttgaaagacctaaagtgcctgaccctggatccaggtctggtgactaagagtatctggctggcaccagcagaaagagagccacagaggggcatgtgaggttcccatggttcagcacggatgactaagccttatgctggactgtcaaggaatcaggagttggggacactgacctgagagagagggacatctttacctcagtttctgcccaaaccgctctactgtcaacccatgatcattcactgatgcgcaagttgaagtttggttagttcttaacctttggacctctttggcaggggtggtaaacccataaacctcttcttagaataatgttattaaatgcataaaataaaatgtatgattacagagaaaacctatcatacagaagtatgctctatctaccgatcccttaggggtaaataaaccccatgtcaaagatccctaaaaaaggcgagggtcttaatgaagaggagggttgggaggtggttctggaggatgggcgtctccaggccttcctaggcctcaatgttcatttttaaatgaaaaatgccaactgaaggctgaacaattgtgcagtctttttcaaaccactttatgaattttctcacttgatcctcacaagtatgccccagtagaaaaagagaatctcctcataaaaaagtgatagttactaagtatttggaacttatcttagcacagtagttctcaagcagggggcaactttggcctgtaggggacatttaacaatgtctaaagatatttgtggttgtcataacaggggtgggagtgtgtactactggcatctaggggttagagatgagggaagtcgttaaacatcttacaatgtgcagggaagcacctcccaacacccaaagaaagaatgacatgaaccaaaatgacaacagtgccattgagaaactctgcttagcttgatgggcacacacaagactgaaggaaagcaaggctcagtgagattaagtgactttgtccaacactgctaagatggttggacacatggcccaaagccttgttctttcctttataaccaggaggacaactgctgttcctaaatgtcctgggactgtagagccagtaagaatagtggtggagcagcccactgcaggcacaggcaagggctcagggagcacagagagcacagaaacacgagaatccaaagcaggccttcagcactgccaaatgttaccaaattagctttgtcttatctccagcctcgtgaatatgtacagctacctagctcctaagatgtttatttgcacccagttactaataaatacaacaaacaagaaacaacagccaaagactccccagggcttgtccaggcggtgcttctagagaatatgggagtacaataaccagcacaagaggaagaacaaatctaattttgcttctcaaatttgcagtcaccttaagttaccaagcttcatcagttttacttatttttaaaaacacccacttcagctattgctatgacaaatctctcaaatgtgtatgtatatatacatgcatatataattaaatttaatttaaaatatgcagcagggctaagaaattgcaccaagctacatccataaaggcatataaaaattgctcctaagttttgttttgttttgttttgtttttttgagacagagtcttgttcttgtccaggctgatgtacagtggcacgatcttggctcactgcaacctccaccttcccaggttcaagtgattctcctgcctcagcctcccaagtagctgggatcacaggtgcccaccaccacaccgcctaattttttttctatttttagtaaaggtgagatttcaccatgttggctaggctggtctcaaacacctcagcctcccaaagtgctgggattacaggtgtgatccaccgcacccggcctcagttttttcaaaagcataaatttaaaatgcactttgaccgaagaagacagtcttctgcaagttccttcttgaagtttagagcatctgagcaaagctatctgactcaatggaaccaagaaaagtgaaggttttagcttattgcagcatgaacttgctttgggacaggatccaaatttatgtactcttttctaaaacttgacagactctttcccccaaattaagcattcatcactcagaggagtttcctccttttctcatacactcaattttcccccatgaatattcaattcttggctttgcctcaatttggaaggtctcctcctgcctgcttcttctaaaaaggaacaaaatccaatcctgctcagatgagagaaacagtaattgatagtaatttgcattcaaacaaattatttcttgctgcttcaatacattatttaaggaaactgaatgtccaggaaaattcacaccattatcaataaacacatttacttctatttccagtctatcagcatgggtccctttacagttatccaaagcaagagcactatatttcaatataagttaccatgcttatttacccatgccaaagagtgattacaaagtacttgcagcctttcaatattgggcacttaattacagcaaacccatgtaagtcaaaaagtagatttctccaaagcaaagtatatcttctttctcttctttttaaaaactcctatgagattgtgaaaatgttcaaacatacagaaaagttgaattttacagtgaatactcctagattgattctatagttaacatcttgctatactggcaaaggcttcttaaattacaattttggctatatcacttctttgaggatcaaaagcagcatttcctgttagtttatgtacagtgctgtagtttaggcatttgtttccctaaacctcatgttgaaatgtgatcaccagtgttggaagtggggcccaatgggaggtgttttggtcacaggggcagatcctacgtgaatcgcttgtgccatcctcgtggtaatgagtgagttttcactctattagttcctttgaaagctggttgttgttatagagacacaaatgggctaagatacacagtaagaaaggtctggttctgatatttaaaacatggaagaatttttaatcagaatgaagtgggcgttttctagactcaccatgaaaataaaatattctcattttgagacagttttttttggtgagggcgtggagaattgaataaagagaagtcagtaaagtaccatgacgaaaaataaatgaagtggcctagacactaacaaaaatatctgagttaaagaaacagtatttggagaacagagaataattcacaaccatgcatgccatacaatgcacactgatcactcacaccaactgtgcatgatactgtttagaaattctaatctgttctagctctaacattgctaactctctagcagaaaatacacaggcagtaaaacagtccctatagacattgtaattataggaggctcagcccagttataactgaaagcacatgacctggtaagatgttacaaaataatagctgtcagcaaaggagggcttataatttcaaaggatactttttattctgctttagtttaaggtgacaagaagctatttaagtgattacatttgaccaaatgtagcactaatagccattgtaatcttctccgccaacaaaataagacaatttagaaacattgttttacttgtcttcacactttggaggtagaaatcatgaaacattaatctcatgattaccataattatgctctcaaacagcccaagtgaaagaacaatcattctcacaaaatggtgccataatggttaaagcttaatgtcttgctaatgatcaagatgtatacacaacataaaataaatagaattgcttgttgtctgctgaagttcttggcaatgctaaggtaagttatcattttactctttccagttctcaatagccagccctcaaagagcaaggggtggtaggacaacaggaatgagtggaaatggtcttctctgtcggatccctcctaactgcagtcactcagtctagcaggctcagcttccactgggttcttctgttgatctttggtggtataaaaagctcagcatctaaaagcaagaaaggaagggaaattgtgacagacatactcttgttggagggcgctgaggcagtaactctaaactaaacaaactaggcaggtggagtttgcagcaataagaccatcagagccagagttcatgtgtctgctacccctgcaacctccaggtcagagcaaacacaacctggaggccctgccctgagaggagggactgcatttcaacctcaggcatgctcacccagtgattcaaagtggaagaatgttctgtatttcaaactggtgggaggggtggtggcagcagtcacatggctgtatacatttattaaaactcatcaaattgtacacctgaaatctctgcatttcactatatgtaaagtctagctcaatttttaaggaatagcaaaatgtgatagcacatattcagtaagtgaagttaatggacaggaactactttatgatgaaacttcgacaaacatgttgatcaataaagatgcccctgctttaaaaaaagtgaatggagagagagggttaggaaaagattctgtcattgtaacctaaaactcccaggcactctttcacttaga

SEQ ID NO: 6908 - DNA, 21328 bp, Homo sapiens
atttttcctattccccttggtatttattgatgataaatggctttattaaaaaataatgataatttccttgtttggttgtatatcaatacagtttcagcttttgtttattactgcttatggaattttatggattgccaacatttagttcttttattggtttctattctcttgatggtataacaagggggtggaattaacaataattttatcccttcatttcctgaccctcccaaccccatcccaactcttttaagaaagcactctagtgcactattcatatgcggctacaggacggtatgatttttactactacataattagaacaattagctgtatacccaaaaactctcctctaagggccagtgcctcaccaaactgtggaaagtgggatgctctgtccccacactgcactgcacagaattagcccccatagctcggaatgaagccccttctgctgagaccagagttttaaacctgttacattaactgcaagaggatcaaataggcaaatagttgatctcagtgttccccagaagaaaaccctatttggtttaagaaatatttgcaagaaccattacaacgaaagccaccttccccacagaggatattgcagttcttagatagcttgtctcaaagtaactcctcttggacctggtttgagttttctcaggagactcacagcccttgaaatgctaaaaagactacatatctctttgtttatcaacagccctccactggggaatagactggttcacgttctccacaaaatgtatgccaaatcagatcaatcacccaaatataagttgtgcatgattctttgaaaactgcttttggttttcataagaaagtgaaggccgagcttggtaccaagaagaggagcagcataagctcttgtgatactttacgtttatgtcatacagttaggaaggagaggaatacaaggaaaagaacatcacatttggactcagatcccatctgtcccacctggggtcatgttcttagcttcttggaatcccacctctctttccacaaaaataattttagcaacgtctgcaattcaggcttgttgcaaggactcaatgggttaaatgtctagcatataattgttgtttactttatatcatctaattttcctttcttctagatcagtagttctcaactgggagtgaatctgccctccacccagagacatttagcaaggtctggagacattttttgtgatcataacttgaggaaggccatgcaactggcatctagtgggtagccaaggatgtggctcaataccctacaatgcacaggacggcccccacaacacagaattatccagccaaaaatgtcaatagggccaagattaagaaatcttgttctagactagtgttaaaataattctttcattgtgattgtttcttctccatagcttctgtctctttaagtgagcaaagatatactgaaaatctacctgctcaaagttctgtgctaggcatatccttaaccatctcgtatatttggttgcctgctgccattttcccaaagcaattcacgtcttcaattattgtccatccctatgaatatcaagcctcagcttctcttttcttctctatgctgctttcagaggtcctgaaatcagacatgctatgtgtcagagcaaagactcgtattaatcaacatccaaatatagcaacagcagtttgaaattcaaagaatgggccttggggacatcaatatttgcatgttcatgataaataactacacatctgtgcaatgttcaatatagttgggagagaaaaagaacatttatgttgatttctgtcaagttccacaactaaaggatctgatatgctaaagaaacataactgaattgtcataaagatgattttaaatatctttataatatacacttatgaattagagacattcctggtttactctgggatttttctaaccatcaattagcttacacacctacccctaggggcagtgaaatgaataattttccagtttgaacattaaacatccattgctttcctatctgaatctggtcatctctacaactcatatcgaccctacatgtaatgttcaaggcccagtttcatgttttcattcttctcactgtatgttgcacacatgtgtatctttccatgagcagaagcccctgctaactatttactgtgggtttacaacctgccaggctctgctgtaagtgctatgtagtcacaatctcatttcatcgtcacaaaaccctgcagggtcagatggtatcccccactcccattttacatggaaaaaaacattgacacttacagaggttaagtaagctggccaaagtcacacagctagaagtgtctgaatgagtgttcacaccctgtatgtgtgattccaaaatccatgctcatcaccactacactacattaggaggaaacagaccagacatctggtgagtgttctttataaagagttaagcagagggcacataccctttgacctagcaaatctacctcaaagaagctattgtccacaaatgctggttcatgtgcagaaacacaaatgtaaaactatgttgactgttgcataacttgaaaaggagacaagagttaacaacctaaacaggggaagcagatccagtctgtggaatacaaagtggggagaatgtagcaaagagtgttttcttattcattatcactttcccttcttctttagtaaaaggactgtgattttattctgtgtggcaatgcaccaagttaaaaattacatttcctcgcctgtcctacagccaggaacagctgtgtctcgtaaatggttaacaaacagctctctcttacaccattttctcttgtgtaaaaactatggccaatttcaagctaccaaactcaagacaatcggcttgcaaaaactctggcaaatgtaacaattggcattcataacctagggtgagctggctttagcacatgactggctagtgctgagcaatgtaaacaaataagtccctgcataaaaatgggacggacaactagctagcatgtgctttttcttttcctctccccttcttcttccttcccgcttaaaacttggatgatatgactggaactccagccttatatcatgaagtgtcttagaaaatgaaagccacagctaaagatgttgatacagaaagacaggagaagccttgtctctgttgacctcaggaagctaacacaagaggctgaatctgttcctttttgtaaaagaaactaaaactcccattttaagccactgttattttgattttcttgtttctgagacagaatctcgctctgttgccaggctgcagtgcggtggcacaatctcagctcactgcaacctccgcctcctgggttcaagtaattctcctgcctcagcctcccaagtagctaggattacatgcacccaccaccacgtccagctaatttttgtttttgtttttgtttttgtttttgagacggagtctcactctgtcgcccaggctggagtgcagtggcgtgatctcagctcactgcaagctcctcctcctgggttcacgccattctcctgcctcagcctcccaagtagctgggactacaggtgcccaccaccatgcccagctaattttttgtatttttagtagaaacggagtttcaccgtgttagccaggatggtctcaatcttttgacctcatgatccgccctcttcagcctcccaaaatgctgggattacaggcgcaagccacctcgcccaccccttattttggttttctattacacactacttaaaacagagaccttcagactttgctacaacatctctattacttgtatctgttataataaaaatgttttattccagcattgtttacaaaatttaaaaggcaaagatgtttaaggggtaaggggttgggcccttgattttggcaacagtatcatgagggcggggggtctggaggagacagagaaatgacacgcctggcacacaaatcctcactgtgggtatgtcctgacaatgaaagggacagactggaatccaaccaagttcaccaactgccaaaaagatttctggtcaaataagattcaggcgcctcctgagataagccttcagtgaaacatcccgtttcactgatgaaacgtgatcaggtaatggggaaagcacaggctatgccgccaggctgacgtctccaacccaggaaacacccaggaatcctgacaatgtggagggaaagcagcaggacttcagccccctgcccaggcagcaggggctccccgattaaggtgtcccaattaaggggaccccagagacggtatcaaagaagtacaaaacagaatatcgaaccaccaccaagcatgcggaagagccagaaaagatagagacactcaagtctatagaccccaatgtactatcagagacagctgcaaacagcaacctggtggttaagtccttggggacagcacagacaaatctagtgggggcttcattcacattccccaaggtggtcataagcactacactgagagtgacacactgtaaaatcaattgtgtgatacctctgccttttcttacacaaaattactgccaagtccatttaggattcatccttgtggaccaggtcaagtcactaggcttttagtacaacttgtgtgcccaaaagtagtgtgtgtgctatggaagagatattaagcataggtccctattcttaaagatgctgtaacctaaaaggaaaatgaattacacatagaaaaaaatatctagagaaccatcatctatgttcaagcattggatgcatattcaaaccttgatgtttatgaattcagagaagaaaaacaaaattcttcctggaaagaagaaaaactgcacagagaatatggtcaggaagacacgggtcttcagaaaggccctgaagaatagataccatttgaatcagaaaaaaatcagaaagaatatattccatataggaaaacagcacacaattggtactaaaccaacatatttccaatgaacaataaaaacagtaaagagaagaaaactagagaggggtaaggataatactggacagtcatgagtattaagcttgaaaatgaaaagtggaaattgctcatttttccttagaaaaatgcatcaataaatattagctagataccatttaggtgcctggatacttgttctggagccccaaatacccaactgttggctcctggacaatggggagcacctaaaggctgaggaatggactccacctactcatcagaattgatggaaacccacacttttcataccgccccaaatgggaagttgttatgaggagaagcgacccagatttttctaggcctcatctgctcataactgaacaatgtaataaccaacttaggagtaatgagcctgccccttgggctaagatatctcttttccagcatatcgcatgcagtgaaattgagtccactttgtgtccccctcacaatgtctagtgggccttgaacacagcatgtgcccgataaatatttgtttgtgaattctactcattatgtgaaaaggcccaagcagggcccaagctagggttggtcagttgtccaaggtgccagagaatcataacttaaggctaagtccatgatatgtgttctccgggaggtggtggcagatttttcacaatgtttgataaaatcgaaggcaggggtactggtatttaacacagaaagcagcactggctttaagttaatgtttcatatccagtaaagaggctaaatatctatcgttttgatagattgctataaatgaaacattagtggggctcttaaataccttgtttcagatcttcattacccgaaattaatcttgagcagaatatcacacccaatgtggactccattaagtagtcagttagataacacaggccacgctttatctaataaggatggaatcaggaacgaatctaacagcacaattttaccactcctgcagcccaagagcattgcaagccagagaggcagagaatgttttccagaaattctcaaatatagccatcatgcccctgcaggaggacagcttcacagtcgcttctcaaaagcagcctggtgacyatgctcagtgttcggtgtggtcttacatctccaccctgggctcacctgggaactgggagagctttgctgcctccacacccgttcaaggacttccacagaaccattagttttggtgaaggtttatctggaattgtcttctgccaacttctctcattatgcagaagcagaccaaaagttcaaaatagcataaattcagaagacaggaaaggagaggagcacaaagctcacatacaaccaatcagctgagctaaaagcaagttgaggaaaacaaatgcacatctctaagaatgaagagaaggcaaatctccaataatctccaggaatccacgcagctgcatgccacatgcatgttacagaggctcctgcgcgtccatgccacacgcccacaagcagcgattgacgtggactttaccattacagaaggcgcatggagaatctggctagagaagactgtgttcctttaaccttcacattcaacacagcaagtaaaggctatttacccgaagaccctacaaaacctatttgcttcaatatggatgtttttggaatcagcctagctcaaaattcctccagtaggcaagtttctccaaaatgaaacaagtatttcactccagtataccattatcatgcatttctatatctaaatatgtttcttcctttgagactgttgacccacttgaatttcagcattatctacctttgtttctttttttttttttttctgagatggagtctcgctctgtcgccaggctgtagtgcagtggcgcaatctctgctcactcactgcaagctccgcctcccgggttcacgccattctcctgcctcagccttccaagtagctgggactacaggcacccaccaccaagcccggctaattttttgtatttttagtagagacagggtttcaccgtgttagccaggatgatctcaatctcctgacctcgtgatcctcccgcctcagcctcccaaagtgctgcaattacaggcgtgagccaccgcacccggccagcattatctacctttcttaaccaactaaccattcatagtaatcatggttaacatgtacataccaggtactcttttacatgttttgttttgtatatactaattcaatcatcctaacaacactgtaagataaccctattactatccccattttataggtgaggaaacaagctcagggaggcaattagctctcttacctgcagtcacatagccattaagcggaagatctgggatctgaattgagccatctggctccaccagtcctacttttaatcccaacactatattgcattggtttcacttgttcagagtttaatcatatgaacccagacacataatctagagtgtaatggtaagaaaaaccaagtgtccctggccatatttctctcccattccttccacctcattccctattttcagtattcggcaattaggtattgcttctgccttgctgaaatatgtttttgacataaaaatggccataagatattccagtaaatacagaatgacccaaaccaggcaatgtattatttattttgaccatgagggcatatccttaatcttgacatcttggctggtttggggcatttcgcttgattgaaagaaagggaggagatgaacatttattgagcacttgctcaccatgtcccaggtaatgtgcctggcgctttcacctagattgctctgtttaataccaaaagcaaatccacccaaggtaactaatgaaatcccatttttagagacaaagaaacagactcaaaaaggttaatacttacatcatggtcaaggagactcactttggagggatggcacgtggattcaagcctaagcctcatctaaagctgagtctatttctacaacagcatgctaggtagtagataccctatcctataaaaccagaaaccattctcagactttttttttttttttttttgcctctgagcagtaagtctttacagatttactggttgttaaatgctactgactctagctaattcccaaattaactagattccttttggagcttgtaaaatgtgctacacactcaacttccgaatttagcatgcaagatgatgaccacagcagtaagaatggtgcaactttcttgttagaacaatgcatgcctaaaagcctccttttaatttctaccttcttttatgaggactatgtgatcgaggacacacctaggatactgcatattaatttcaacacagctaatacccaaaatgtcccaccaatttactcttcactgacaatgttaaaagaaaatgatttatgcagatcaatcatctcgctcatcaagtcctaccctgacagccagccttcatcattgctatttaaaaggcactgctgacagaaaagaccgactctttgattaagggtcctgtctggctaaccttttatttgaagaatgattgccgctgagtgacaaatacttttccattcatttcaaggcaaagatattgacattcaaattcttgatggctacactgagcagatgccactgttggcaagaggcatgagagcaacagcaggtactccacggctttgggggcaagggaaaaagaataaaactaaaacacatgcacgccggcgctggctaaaggttctcaacaagtraaagttgcgggtctttcagccagatcctctttcttcaacagtcagcaaagggcatctgcttgcagtttcgccccggtctccatctcacaagtgcctggctttatgttgactctacttggaactgcaccggcagcgaggactagaagtcaaaagaagctcagaacatgccattcccaacccaagggaaaaacatctctctgtccggaattgcagcaccctggccgacctcaggctgaaagtaccggcctcctttccgcttcacaggatgttaagtgactcaatataaagtggaagaagccggtgaaaaatcacccataaaaaacaaaacagaaatattccatcccatctgctaaagaggaagaagaaaaaataataataaaaggaagaggtaagattgacaaatagagttagcaaaaaagacaaactgaacttattttaaaaaggtggtttttctaattcatttcaggtgaatttagaccttggtcagcatcacacacacacacccccacacacaaacactgcattcatatcctcacagcaggattattttgcttgtttttatttcttaaatgcaaaatattaccttaaaggaaagtgagaaaattatggattaaggaaggctatttgtgacaaaggccatcacaaagcctcaagattaatcatttccaggaacaaaatgaaaatacctcagcaggtcatcaacaattccttttaaatcttgccgagatgcaatgttggttctcacatgcttcacaaaggaaagggtatccgaaaagctgtagctgtgatcctcgaacacattccccacagagggagaggcaggagatagccaagacacagccagaaccttctccccatcaccccagggccaaacaggtgaccagggcttcagagagagagaaaacctgggtgtgaatccaatctctactactcatcagctgggggatttgaaacaagttaccacctcaattctctgtgatctcatctgcaaaatgggagtggtgagattgacctcgcagaattagttatgaatattaaagaatagaaactaaataaagcaactttcccttacctaaacctcttttttcctcctttcttctcctcttctcctctttgctcactagtttgcatgtgaatcgaatcatccatgaggggtatcagcaaaaagatttacagttatagcctcgcttccctcactgtgttacaatgagaacaaataagataatgttcgcattaaagcactttataaatcttaaatcaatacagaaatgtttgctgttgttattgttgttctccacaaacggtatactctaacccattttgatctttttcctcatttatttctcccatctatatttctcatggtgaataataaatcaataaccaattaattagtcaataatcataatatcatctccattcctgagaactactagtggttgtttctgcagctgtctgaaaggagtccctgggagaaatgatgtttcttctataacaaaaatgtatcggaggttattatgagccaggcactgggacaaagaggtgaatgaaaaatgcaaaattcagtcaagtgaggcaaacagaaaaataaagaaatgatttcaatattgctgcaccatataagttaaatacaaaggccaatgaggaggtcaatgaggaaaggtatgactacctggggcaatcagggaagattctgctacagtgatatcaaggcaagtcttcacaaggtggaaaaggaagagtgggtcacttcggagaaagaggatgccaggtgcaaaggcatggaggctcaagacagatcaccatgctctggcagggacaagggggaagttccaatcatactaaagagttaagacttattsctttaggtaayggcaagtttgagcttgaaattgctatcatacagcctatggtttcaaacatgcccctgatgaaaggcaggamacaacaacacttgctgggtacccacacagtgctagcaactggagacacacagatgagcaaaactatcctgacacactcccaggaaggggagccagggagactcgcctgctctcaagcaacctctgagcagctgcccagtgaggggcaatgagaccccactggccctagtacttgtgccttcttgtttggcctcagaacctgcatrtcatccccagtctgttggggtgggttcttgcttttttgcttgaccctcctcttgcatttctatggactctgatgtcaactatggatagctcacattcaccttcagagccatgtcctccagctattgctgtcctgctttgacctgcagtgatcctgtggtctccctgatggctcctgaaagcatctctgtcagcagggagatctatattccaggtctctatcccttactcttggtactgtacccaaagtacargggtgaacatgtgttcaccaaatcctgtttcactctccttctcctgggcacacagatggcaacatttgacattctccctcacagttggtttgagttctagtcaatatagcaaaaaagggatgtgagtcacwtcacagtayagatctcccatactagctactatagccatgacaataaatgcaatgacttaaaacaacagaaatttattctttcacttttatgggtacaaggaatctaaaatccagtgtcagtagggtcacatcccctccaaaggccctaggggagaatctctccctggctcttccaattcctggtggctccggcttaaccatcttgccacagcatcactccaatctcttcctatcttcatatggccttcttccctctgtgtgtctctgtgtctagatctcctcctttctcttacaaagtcaccagtttttggatctagggtccactctaaatccagtatgatttcatctcgagatccttaagtaactatatctgcaaagaatctatttccaaatcaggtcacactcttaggttccaggtagacataaatttgtagggctgggggggtcactattcaattcactccccctcccatgcaaccttggaggtctcatgatccagaaggtacagccacaagatgccagagccttcatccagccagatccctgagtcactacaagaagccaggctccctcaacaccaaccctcactgggcctataaggtgagcaagaaacgaagccttgtggtgttaagccactgagatttcagggttaatttgttacaacagcagagcctagcctggcttggctaccactccaagcatgatgccctagctctgcaattccagtactgtttatgggcccagggctagcatgcagtatttttatttggcttcaatttctgctcaaaagcccttttaggttgctcttgctgaatgtcccaggaatttctcccagagctttgcttggcttggmcatgactttgggaggtttcttgtttttcctgggtagtgtaattaggcttttgctgataatatcactgttttctctactggtcccagaggagaatgtggtggccaatggtagttatttcttgcttttattggggtgggggagaggggcaaaagrggtcaaatataaatgttttctagcttaattcatccaaaactgaaatgagaaaaacagtagctagtgtccctttcttacagaagtgaaaagagcacaagattttagagtcatgctgacttgtgtaaaaatttctcagctctgcaaacttaatggctatgatactttaaaatattacttattatcacagaaccctagctctcctacctttacaaaagaaccatttaataccacctattccagaagctagctgggaggattaaatgatactagacatacatctagctgggtgctctgatcacagtcattcccagataaatgtgaacttcccttattcctacaaataggccaatttattcctacttggatcccttcccttctggcccaaggtaatagctaagttcttgtgaaaccatgaccttcagcactggtctcaaccctctccaaggcagaaagcacttctgccttttctctagttcatccttttagatactgctagtctattccttggaaatagtgacaagatagtgaataaactgactaatctctttaaccaggtgagtgttgctcttaaatatttcatgagagttcattttgattttccagtttcattgaaagttctttaaaggtaggagttatgtctgatcctacttctgtaaaccccacagcaggcagcaccatgccaagctgaccacaggtgcctcccccatcctcattgattgactacagagaaagcagagaatgaaaagtttccatgattaagacaggatctggcctccaataacatggatgttcacaattaacgggcaagtatcagtgagctaggaatactcacagagcagggggaaggtggcagaagttgaaatacttaaaaaatagacggacaaggccaggcatggtggctcatgtctgtaatcccagcactttgggaggatgaggtcagaggatcacttgaggccaggagttcgagatcatcttggccaacatggtggaaccccgtccctactaaaaatacaaaaattatctgggcatggtggcgtgcacctgtagtcccacctactcagggggctgaggcaggagaatcaccagaacccaggaggcagaggttgcagtgagccaagatcacgtcactgtactccagcctaggtgacagagtgagaccctgtctcaaaaaaaagaaagaaagaaatagatggacaagagggaagattcatctctactctggggctagggtggatctccccagaaatgaatcagattatagtgtgtttactgttccctcccctgctgggccagttaaacttactcttataattgtgtgaatatataaattatacattatacatcatatagcatatatgtgcattatatataactattcactatctgtgttatatataaatatatatttatagcacctgctttgtgctggacactatcctatatattaagtcacataggcttcatcatgaccacaacatgtgttccactgttactaccatcttacaaggaggaaacaaacccagagaaacctgccccaaatcacagaactagtgagtggcaagaccaggattcagatcccggcagcctggctaaggccagcactcttaaccgctagaccacaatgcctctcaagtgggagctgggagtgaagtgaaaaagtaggtccccagtcaggagggtacccagcagaggtggctcacacacctaaacagattctgaagacatagcccttcaacaaaagcagcttgttgcagaagcaggagactgctctgccaggcacagatgccatgggacagctctgtctgagaaaagagctagtggcaacccatgttagcaataacaggagccagactgaagcagcccccaaaaggctacctttggtctgagatgggaccaacccacaattaacaccctgaatagcagcagtatgtgatggcccagagacacacagctctgggagattgaagacaaaggaaatggaaggggctgggggaggttccagaaagccttgttgggtctgctttgagcttcacatctttaatgttcaaactgctgggggcaagagacagccagctttcccaccagccctgcacagctcggcagcctgtactctgcacttgtttaccatcactgaataaatcatttccgtctcccccagccttggccctgctcccttacaaacagagtaaacccggctccccactcaaggttgccatcaaaagcagagggcaccagctttccctccccggctctgcagccctcatgggcaatgccccctcctcgctccttaagcayatcagaatgagcaatatttgactgttgattctttcatctctgcagctttgaaaacctcaaacgtcatatcggatctacaacaaagagcagggacttcaggggttgacagcacggccataattaaagacaaccatcagtgagctgccatgttaaacaatgccacgttatagctgctccaaaaccaactgtttacctttcagacatttctgtggaaaggtttaaacaggtgcggtttaaattgttttcataaaagatatgcaaacaggagataggaacttttcttctctctaagacagggtaaaatgtacagcatgcaattcccttgctaatagtgtccaattgatttacttaggggaaccartctctggtaactgatacaaatatgaatcccaaaatagcactgaaaatattacagggatacagccaaacatggaatgggaaataatccccaaatttccatcttaagttccttctggcccatgaacctcagtttccccctttgtaaaataagaaggctgcatttcaagcttatgttggcatgcagaactctttttccaaatcaagtccaacaaatagtacaggaaaacctagtggtttctgagagtggatcagggtcccttcttcctccaatatgcccccagatgatttctagaaccttgcgaactactggactgaatcmtctctgtgagttcttccaggacccaaattctcaagttctcgagagaaaaagcagcaatagcagcagttgtaaaaggctttctccatcattggtccacaatgctttcctcagtgttcagcatctaagtggcactgaatgaatgtggttctgagttgatcaataataaaggaagttgtaaatagcttcttctctgcttctccttgagtttggggtaaggttaattaatatcaacagcaaagggaaagaggcagatattaaagcaaattatagtagcctcatggtttgctaactaaactcctcaagctgggtattcatagcaggctcagtgtcctggcccccaggtctgaggcaaacagaggagtgtgctctctacacttttcttctgcctcagaatcttaagtcagcatccccaaggcctgcacttgtcatgtttccaggtctacctctacgctggagatctctagaggttttggagctccttgaaagtaagactgtgaaaagacagccaggaacattgctaccttggacaatgccataagaattgaggtgggaacaagaagactgctctgtggagccaccaagagattcctttggagtagctcaaacagagactcctcagtgggatgtgggaggtttccccacgcacaagagctgcttacatcctcattacatatgactcacacatgttcgggggaccactggaccaggatcatactgactgtggttaagtccccacatgggacatcatgacccattatgttgaccactagtggaattttccaatacctgaggatacaacactgttagaatcaatgcaataagctgtcgctcatttctttgcaagctgaaaacctatttataaaaggaagccgggcacagttgtgcatgcctgtagtcccagctactggagaggttgatgcaagaggattgcttgagctcaggagtttgaggctgtagtgtgctgtggttgcacctatgaatagctgttacactccagcctgggcaacatagcaagaccccatctcaaaaaaacagatttataagaggaaaatctccaatgcttgtttgagtcagaccaaaagaattgcaaaggctaaatctgacctcttcctataaaaataacatggagaatccttgtgtggacaggcctaaccttcttgataggcccctctcaggaaggccccacaaaatctacagtggaagaacaatccacttctgtgaaggaaaagttaacggccagttggtttcaattgactaggacagagctaagtgaatgtagataaaccacttcccgactgaggctaggccaggggatcctcccccacacctcccaccgctgatatcattcttgaaagccttgtttccttccagcctggaaagctccattttggaaacaatgaccctttatggagagctttcatccctgcttaagttctaaaaatcaaagagccaatatgtctaagctgccctcaaggatctgggaaaactgccgtgggtacgttgttatttagtggtaatatcttatttaacttgtcagttgtcttgctgttttcagaatgaaaccagatataaataaagcaaaaaaaaaagtgtttgagataggctactgatcactagtttattttttgagttgagaagccacacagttttccaagcatggttacattatggtaatatgctttgtcataaatctactatatccttctgcttgtctataaaacagtctgctcctcatcgttctcaacttggcctgcatacagaacttttaacttaaaatatctaacaatatgtcatatccaccagatacatgacagctatttctaagatacataatattattaattatttttgaatttaactgaactgttatgaatccaaaaagtataaaaatgacatttagccatcaacagttcttgaaacattatacacacaaagaagaaatactaacaagtcctacagtactcataatttcaaaattataccctttgaagccaaaatgacattaagagaaacaaaaaggatgtaagaacttaaaaataaaaatgcaatgcttgaaaatattaaacttgtcttcagataaaaattaagtgtgagataaattattttttatgtttgcagaactgtcaaacaatgtgctgtctccttaaactatttaaagaaatagggctggagtgtgtggagaggatctggaagacataaatgacactgagaggatgagcaagaagactgacttccatttactctgattcacttagcatgtactgaacacctaccatgtactcatactatgctgtgtatcatggcggattaaaagaatgatacagactaagccttaaaggaacttacagactcagtgaggacatgagaaacacacaagatgtgaatataatgaaacacaactacctttgattaaatgcccaaataaaagctctggtaagtaatgtgagcattagagcaggaagaactcaacgtgggccaggatagttgaggaagctccattaggagctagaatttcagctggatcttgaagactgactcatattcagaaagatataaagaaggccagagggaactgacaagaggggaggcagagtaaacagtgacccaaaggctggaacaaatattactcactgggcgaagtgtgagctgaaatgagtgagtggcctcaccgcaggcctagacctcaggtgacccacaactcaaggacgtggaaaacattcatcattcatctgtctccctcttcccacatgtttctcatagacagcttcattggcgtcccccaggggctcggagttctggggctcccagtgtcccctctcaccagacctgctccactggacccacacaggaaccccctagattcaccaccatgagtcacaaacttccttccccagctccaagggctgtgctttctttaagaacccatcaaattgctcagaactgggagtggtcaatcccttcacctagttaacatactacaatctttccattgcagcctctctgtgctaacctgagatcagtggttctcaaccaggggtgactttgacccagagggacatttggcaatgtctggagacatttttaattgtcacaaaggatgtgttactggtacctagtgagtagaagctagggatgctgtgatacatccttcaacatatgagacagtcccccataacaaacaattttctacctaaaatgtcaacagtggcaaggtcgcagtggaatgaatatagacattcacgatacttttctgaacaaatttattttaacaagatggagagctttcctttttcttttgtatttttcttaaattttactcaaatccattcactttcagaaggtgtacacccaaattccaagaagcttcccagggcaagctgggatgatccatacatccctgattaatctgcccccccccatcccaccccccccaaaaaataagaatagtgccctgaggggcagggcactctggctatgaaatgtgctctagtcctgcaaatgaccaatatatacctaaacctaactagaaatgacaggatattgaaagccagtacattttgtaccttttgggcccttccacagcaagacgcactttaggtacttacattttaatagggaagaacctcattacccaaatatttgctattcgagcactttcagttttgaatttgcataaggaaacaaagtcatcataactattcattagcgaattgaccggttcccactcaaacttctcttccaagtagcattcatccctgatccttgtatcaacaatttaggcccatctgatggtcaaatgttacataagcctctggtgcaaagcaactgcaaaatgaaaccgaaacttctgcaaaagatgtggcgtttcacgaactcaactgaagtgacagagaaatgctcaaattacacccaaaaccattgatcctatgcccttaggccaactgaaaaagcaaaaatcaagtcaataacaacattttataagactgacttaaatactgaaggattaagaaaggccctcataaaattgataaagtcctaattttacaaaaataaacaactttaatgattgcacaataaaagcaaacatgaagtaaaagatatatggtgccagcgtgtaattctgtcattaacacttatggagaaaaattaaattaatagttgaattgcttttctgagaattagagcatagctgcagctacaactgaaaatgtttttgataccaaatatttttatccttttgggtttcagcttgcaagattaaattccaaactttttttttctagatttactattacatactgctttccatgtaagttgctttgctttagctgatcttttccagtactaattgccttcctaccatgggcctccccctgaaaactctgaccacctgaagcaaccacagagctgcaagacgggctgaatccctctcccagtctcagcttcttgcccaacctgcctttcccacacctggtgattcaagccctgtgccacacccttcttcacaaaacccccccacctctgtctgactgccacacctgattctcaaaaagtaggaactggaaggtataaggaaagtctgaaagcagaaacagaaggccatccaagatccatactcaaatctcatctctctcagagcaaaattccaactcctaagcagagcccaccaggccctgaccaacctggctcctgcttcctgacttcaacctcaccttaaagctctttcagcctcatcacccctctcactcaccagccacactgacctcctctggtcctcaaactcgccaggctttttcacactttgcagcactggcaagggcagtgccctctctcgggaatgttcctccccaggtctttccattctgattcacgcgcctcagcataaatgtcctctcttgcaatgacttttcttactagcctatgtaaagtgccctcaataatctacatatacttagtaggtgttaaagaactcttggctaaatggatgactagataaaaaaaaaaaatgcatggatggaaggaaggagggaaggagggagggagtgaacctgtgtagagtgagccaatatctgctgtcaatagccattatcccctacggccattttccaagcaattgtttctctcccttggatcatttgagactgaatcagtgaatccagagctaggcagggaagagcctgattaaggtcaccacaccaacccccagggacagttccctatcatccattttctcatgctttgtgtcaagtcttatttccagcccctccagtggcaaggcgtctattacctccccacggacacgtctacacactcgccccattgtgaaatttgtcctgattttcccagcctaaattcctctctgcttaacttcaccccattactcacagctatctccctctggactacagcaaatgacaactccatagaactcactttctcctcctggcttcccacaagttcccaattcagcttcctattccttgatgaaatagcgtggcatgagacccgagcaaggagagtttccacaaatgttctgaattagaacttggtcaccagcagcctcacttcacccacccatctctcttccatccatcattctcttgccccaccccaccctcggcctccacaaggccaatatggttttattttccaattacacaattctttcaaaatatagttctgtgcttgaatattcacaaaaagtttctggaagacaacaaaagaagctgttagtgatggtggcctctgggaaaagaactgctatagggaagaaggcttacttttggctgactgtttaatgctattggcatttttaactgtgtgcatatacaactttttaaaaattatggtgaaatacatattacataaaatgtatcatagtaaccacttttaagtatgcagttcagtagtattaagtatattcatactgttgtgcaaccattaccaccatacatgaaactttttcaactgtaagtttttaaattaattcttttttaagagacagggtctcactcagacacccaggctggagtgcagtggtgagatcagaactcaatgccacctcaaactcccaggcacaagggatcctcctgcctcagccttcagagtagctggggctacacgtgtgtaccacca

SEQ ID NO: 6909 - DNA, 16196 bp, Homo sapiens
catgcaggtttaaaatctctattttaattctccagagttagactaggaaagcatttcagacaatgccaacctgtagtaatgcttgctttttttttttttttttttaacctatcggtacctcatagtttcataggaatttgcttaacaaatctggacgtaattagttgcctggcctccaaaacccaaacctgtattctttggtatcatgggatgctgtttgccaaatgacaggcctccaaaagcctgaccatcctaaagaccatctttgctggtgggtgttattcctgtgcttagtatgaattcccttcacaccagaccttcagcaacagaggtgtgttttcaatatccagcattcataaaagggtgtagattcatgtcataccagagcagaagaaagggagtaaacagtaaaatggagatatattaagccatcattcccatgtagtagggagtgttagaaaacaattgtttaaatcacccttctcttgattaaaataataataataaaagaaaggtttcaaagtggctgtaagaagaggacaagttgactcagaggtaggtacttaaatcaagtgaaaaatagcttagataatgtgcttgatagatgatataacaaccagagtggaacataaggggaaactttgtggggtgggacagtttggaaaggtttgaattaaaggtttacattgttgaaggaaaagtattatctgtcttaatcttgtgctaataaagtctaaatagctgggtgaaatcttagaggactatgtcagagcgaatgattttttattctatacttcttttccaagatcctatttctgtaagaaagacatatttttagtatctgtaagaaagacatatttttagtatcaaaaagtaataatatcacttgccagttgaggatcaccagcatcatcattaaactttatacattatatgtgggtagccacagatgtgtcatggaggtggagagctgagtgatgttgctgtcactgacaagtggtataatttagacacagtatgggggacatgagcactcgacacaatcttgcaggtggaagggagaggatccatgaagaggtgtctttgctcaagccaccttgcccgtctttgatcatgcctctccacctggtcctcacgggggcttcagaagttctggtcaggggctctgcattcagcaggtttgacgctgctcctaaaggttgatggtgttaatgtaatgttactttgcctttgggagtggagacgtagtgttttctcctgattggtagagtggtgggaaagggattaaacttcaatctagctctcagctcctgacgtgagccagaaaatttctggttaggctaaattcacagattttctctactatacttatcatcaaagtttgccaagaggtggaagagcagaagcacgaagatcagtagtatcctagaatatggtctcttaattccctattttcctggcacctttaaacacccttgctcccccatctaaaaaataccaccaagaagaaaccttttataccctcaagactgaaacaggaatgagaggcaagggtagaaaactgagatgacttgtttgtcggcactttaaacagatttcaatactgtgaaattatcttgggggttgtttcctcaaacttcaaggtgtttaaagatgattaaaagacatgttctcttgcttaaggatttgctgacatgtaatgctttttttttcctccaaataaatgcaggagtgacatttaataaagagtctgagaagaacatggccctgagcagtacttttattcccattaccttttaagaatctaactcctatgccactatccctccccctccacccacttgccctaccttctccctcaccattattaatctaacctgaatcactctattcttctccaagggaacacacccagtaacagcagtgaatcatagacactattgcctctctagtctctaatggatttgacaaaatgccagatctgggagaataaaaggacaggaaattcaggtgaagggagctttttaggttcttgtttagtacattgtcctgaatattagttattagatacattttctagctgcctggtgatggaaaggtttcattgtgctaataatactgatcctctccgtatctccgtgttctaagtaaccatcctactcagtgaggcaatcgctccggcatgcctaacagctatgtcaagggcccttttctcttgaagttgataataaaaccctctcttgcatatcttggctaaagaatatgaaatagttaaatcataaaggtcaatgtttggtaacaaagtctctacaagtgcagccattacacattatggaattccatgtgagatcgttaaggtaatagagaaaaaaatagaaatatttgtcaattattctcaaagagaaatttatgaaattacacagcactaaaacatcactttaccatggatgggtctataagatgcgacttgaattcatggcaagagaaactcatagaagagtttttgaagggcattttcaacttatgtacaaatgtcataagaagtgttgaaagtcagttaagagaatttggcagattttcttgtgttataaatttgtattaaatttagtttgtttaatttgtcctaatggacatcataaatcaacagaatcatgtggattttacacaattcctcacccaagtggattttaatcctagtttcagaagcgtatatttttatctttgtttctttttttttttttttttagaaggagtctctgtcgcccaggctggagcgcaacggtgtgatctcggctcactgcaatctccgaatctccgcctcccaggttcaagcgattctcctgcctgagtctcccaagtagctgagactacagacgcccaccaccacgcccagctaatttttgtatttttagtagagacaggatttcaccatattggccaggctggtcttgaactcctgaccttgtgatcagcccgcctcggcctcccaaagtgctgggattacaggcgtgagccactgcacccggcctatgtattcgtttcttttaaaaaaaaacctatggatactagttatgtctacatgacacaaaaatttttgtcaatacagaaaagtctatggtaatataatttaagttagcttgagactattgttaagattaaaaaataatactaaagctgagaatttaaaaattaaaatgaacattttaattatggctaaaaagtacgtgtgtttgtgcttttttgtataggtagagagagagactgagagactatttactattcttttcttgccattagacaagaataagaataaaaaaaatttttttgtaaaacctcataaagattttaggtctatatcatcatcccaccaacaataattacagacaagaacgaagcattttaccactccctgatgagtaacaaagtagccaacagtagccttgggtattgaagaaattttaaaacacaaggaaagcctgacttaagttgatattaattactattattattggagtctactgcttaaattgttctctatggcagggtaaggagtctttgcttcctggctcactgggccagtattttttcctgcctgaaaagtttcatacgaaacatacaatgtcctgtgtcagaaacaccaaagtcttcacaggctaatagatttgaagtcacttaagacattgaaatgtacgctatgctttatctaaaggtacaattaaaagtatgggggctatattccagatctctgacatgaagccgagaggaaactggatttccagtttgttatgtgaaaaggttaagtaaaatacaaacttctgtacagggagataattcagttctaataatgcatgaaagccagagatgtagatcaacaaatgcacatttctgaaatacgggtttttctgagtatatgttctgaagttctttgaaaatctggccaaacaatcccattttaagataccagttcacataataagcaagtcagaacatttgcaaggcaaaatgttgttttcctttctgcagccaggaaaaacacagctctaagcttaggttgtaacggtaaaaggatttgggagctgctgattttagagactcataaaaacaactcgcccttatgccgggaggtataaagaatatgcagagtctgcactgtgcttctagtgtcaggacaaatcattctgctttttctttgagattaactgatgccaatggatgagtaaagggagaaataaatgtacagactgagacctgcagcttggtgaggtgagtaacacctttatcacaaaatcatgagttctctcttcccctttgtaaattccttggggttaacttatgtaattttaaaaaattttaggagtgaaatatgtattattaatcatatgtgaggctctacattttctgctatttatggtttatattgtgtgggatcttacagatcacagcatctttttaaaatatatgtgcttttttggggggtgggagataaatcaaggggtgaaactgaaggtgatacattcccttaaatccattagggaatggtgaatacacttgcatatataaaataactactgagtgcttcctagatacctagctctgttccagctgcctctcaccagttctcatttaattctccaatcccatattaagaggtgaagaaactgaggcacagaatcacctcattaagaagcacataaagtatggtgccaggatttgaacctagacaatttgactgtaacgtgtacgcccctaatcattcccttaggtagtcctcaggttctgtaattattatacctgactgcttaagactcaggtaactcccttttggccacttctaagccactactgtcagatgttattaatagtaaagagacgatatcaatgtttaaaatggccattcaataagaggactgaaaacactggcccctggaaattcccaacttccacgtgactcagaagttactcaactctttcactaaacccagtgctccacccaatgtagctaactttgtcgtcgcgtagcaacagaacctcgccatactggaagcggggcgcgggggggggattttctcgactgaggatgctgctgcccggtagccagcaagggccctgtcggtctcaaacgtgaattttggaccgacacaatctcatgtagtgattgttctgcttcctgtgttgcgccacaacaaatttccttgggctacattttccctcagatttgagtaaaagatttgaggtcacgctaaggagcctgcatactgaggtacagaaacggttttttgtttacaacaacaacaaaaaacctcgcgacgggaccgccgagtttgcggcagccaaaaaagctagcgatgagctcagctaaagtgccgggactctcggatagatttctaacatgtttgaaatgtggaccccaacgctggaacccaacgctgttcttttgtggtctctggaaccaccacgctggaataggctggaacccaaccaacgctgttcttttgtggtctctgcctctggggagtccacaagctgtaaatctaacatgcagccagccgtgcggcttctggccgccccacgtctgagtaaagccttcactgtgactagcagggagaggagactgactggagccagagaatggaggcggcgggctggcgggggtggggagaggcactttcaggcgcacttcacagacgcacaaaaacaaggaagcctgaagggaaggcggttgaaaataaggcaacagaagccgcgaacggaagcgcgcccccctcaggattggtttaacattccgaagctcagcctcgcccgccccgaagacctgctgcggatcgcggccgcgcgcgcgcgcactcacgctgctctcgggcgctgggcggggagagccgcgcgcaccggttaattctgccaatcatgcgtctgggcctcccatcgtgtgggccaagccccgccccaaccacccgctggcggaggcgcgcgcgcagtcccaccgctctgagtcgctgagtgaagyggcgcctcgcgcgtcaggcaatctggccaattgcgcatcttttccgcctaccgcacggccccgcccctgccacaggatcgatttacggccgcaggtgcgcgcgcttttttgctctcgctgggaatggcggagggaggtaccctgctgaggggaaggggggatccctgacacctgggcttccccgggagtcggctgtggagtcgagttgagctccctttccgggtctggggaactcamcctcaccttatgcctggggtctccggggaactagtgggctttctgcaacggggggaaggaggggacgactcccgcccctagtttacccctcaaaagttaatgcctttgtcggaggaagcaatttcagtccactctccttttcagtccctgttggccgcttaaactaaaaggctacagacgggcttaaatgcgtctccrctgtgtttcttatgcctcgggccggcagggtaacgggttctagtcacagcttgtagagttcaggatgggtgacattcaggtcctattgtttttgagtcaaggtttcggctatagcttcttgaattatgaagctgtcataataaagaattcctgattatctaaagctgttattcttccctacttccaaggcagaatttgaatatattttggtggatgaaacgaaaacaaggagagtcttgtgactatgagatactagctggttgatgtatcatgaaaaacttagtggtccctatgtgggaaggtaaatggaaaactgcaaaaagagcaagaatgaattacaaagtgaaattagaagaaatatctggcttacttgtggatgctttgtacaccaatacaatatattatttgataaaagtcgactatagagaggtgtggttaattcgattattttataatttttcttttttagagaaaaaccaagatttcactttcaagatggaaagtccgtcagrctcagctgtggttttacctagcactcctcaggcctctgcgaatccatcatctccctatacaaatagttcccgaaaacaagtatgaaaatctttgttcttccagtggatccattatgtgtttctaagtattgtggcagtggtggtttaaattctacggaaggttgttaattaacataatgtgtagcataaataagtagacattttattaaataattttgtttttcttctaaggtgacatatatgacacccaccagcccccttccatattttcctcttgaatgaattcatttcagttagtttcagattaggttattacaatactccagatggagaaagtttgcatctgtgcaatattattatgaaggtctttagtggcagagtctaggtcttttccttactctgtaattctgaagcacctggagtactatcaggcatgtgcttgttactgaacaaatgttccttgattactgggataaacttctcaacacttttggaaaggtgttgatyttgctgaagtaaaaaggaaataaaacaaatggagcttccagaaattaaagtcattttgtgatgccttctttagatgtggagacagaaagccatctagtggtgtctagcatagaaatggaaggmctttatttctggtgatttattgacattargaatgtttttcttgattcacatttttaatgttttgtgctctttatagcctatgagtgcaacacttagagaaagattaaggaaaacaagattttcatttaattcctcttacaatgtggtgaaacgtcttaaagtagagagtgaagaaaatgatcagaccttttcagagaaaccagcatcttccacagaggaaaactgtttggaatttcaagaaagttttaaacatatagacagtgaatttgaagaaaatacaaatttgaaaaatactttgaagaatctcaatgtctgtgaatctcagtcacttgattctggatcatgcagtgctctccaaaatgagtttgtgagtgagaagcttcctaaacaaagattaaacgctgaaaaagccaaattggtgaagcaggttcaggagaaagaagaccttcttcggaggctaaaactagtcaaaatgtatagatcaaaggtgagaagaatttcaggaccattgcataatttttatttttacataaattacaggaaagtaatttcaaaawtagaatttttttttttaccataataagcaataagccaaatattcagaaacctggcttccaacagctttaattcaactccagatttagagtagaaaaggcccttaaacaccaggtaaaactttttaagaatctcagctctgatttaatatgcagttaaacttttytctctagtttctagcccacagcaatattagaagtattaaatgttagatgcaagtacaatgggaacagaagtgaaagctgacagtgaattagtaaaactaaaaatgggctgtagagtacaataaaaggtatttttagtaatgatcttgtgtctcccccaaataattaatgtgattcagccattttatttgagaaaatatatatatatatatattatattttagatttcaacccatataggttgaattaaatagaacttgggtacttggaaggagaataatctttattacctggaaaattcatatatatgcaatagctcattttccctgaattacgtggaataagwgatgggatagtgtatctcatttgttctcttgwaattctggagtttttaaaaaataaaatttaggagtattgaatgttgaaaaaatatattttatttatttattcattctttttttagagacatggtctctgttgcccagcctggagggcagtggtgcagtcatagcttattgcagccttgaactcctgggctcaagtgatcctcccaactcagcctccctagtagctgggactacagacatgtgccatcacrcctggctaattttttaaaattatttttttgtagayatagagtcttgctattttgcacagtgtagtcttgaactcctgggctcaagcagtcctcccaccttggcctcctaaggtgctgggatcccaggtgtgagccaccatccccagcctaaaaaaatatttttaacttgaatattgtaattttaaagagcagttttaggttcatagcaacatttagtggaaagcatagtgtcattttttaaaaagtacagttgtaatacagtagatttttccctgtattattgcttcttgacatagttttggccctatttaatgatttgatttttcccttatcataaagatggcccagagcttaagccaacaaaatagccatagaactcaagttgagtgacattgtaaccattctacatatgaccatcctactttttcctagatagaagtcccattcwtccctgtgtatgttagcctttaaacctgcacatccactaatttaacaactttaattaagttgaactagcatgactagttattgacatacatgtttttttttctgtttcagaatgatctgtctcagttacagttgttaataaagaagtggagaagctgtagccagctcttgctttatgagttgcagtcagctgtgtctgaagagaacaagaaactaagccttactcaattgatagaccactatgggttagatgataaattactacactataacagaagtgaagaagaatttatagatgtttaattcctgatttttgctccagaatatctttgagaatgacaacttaattaaaagatacttaggcactttttttttttttttgagactgagtttcgctcttgtcatcctggctggagtgtgatggtgcgatcttgactcactgcaacctctgcctctcgggttccagcaattctcctgcctcagcctcccgagtagctgagattacaggcgcccgccaccatgcccggctaatttttgcatttttagtagagactgggtttcaccacgttggccaggctggtctcgaactcctgacctcaggtgatccaccgcctaggcctcccaaaaccattagggctcagaggaaggtatcccratgaatatcaattaagggcactttaatatataaattataaactaagttctaaaaggaaaattagtattttggatagatttgtcaaaacgacatttaagtcatgtttaaaaagtcatttgggcagttctggaaactagttttaatacatttgttttttatgacaaaaagttttattttaaatgttaaaaattgtccaatctggtgaatgtctaaccctaaagtttaaaaatttctgcctcctaagtttatgtaccttgtttccatccatttaccacatatttccatctgatagtctagcaggtaattaaacttatatgtccaaaaccatattcttccctgtctcttcaaatgtgttttgcatattcatcatttagtgaaacaaccatctatttcttcttctttttttttttgagacagagttttgctcttgttgcccaggctggagtgcaatggcacgatcttggctcaccgcaacttccgcctctgaggtttaagtgattctactgcctcagcctcccgagtagctgggattacaggcatgagccaccaccctggctaattttgtatttttagtagagacggggtttctccatgttggttaggctggtcttgaactcctgacttcaggtgatctgcccgcctcagcctcccaaagtgctgggattacaggcatgagccaccacacccggctaaaccatctacttcttataaaactacatttccttatctcccacccacatgaaggtatcatggcatataaggttcttcgcatttgtttgcctttctagcttcatctgtgaaatgggttaaatttagattggttattctatttatgaacccacctccacaggttgggtttctgctgccaaattatacagttgtacctatcattttggccatatatggagataggacccaaactgggccagtctctgaaaatttggaatttagctcaggaaaagaaagcccatctctttttgtgactgcagctgttgtatatatacctggaagcagcagagctgacatgcttaagggcagtgagtgtgcttaccgagaaaggcagaggtgataggagagaattttatggatcagtggcttcctggttttagttgctagtcattcttaagagctttctggatttctgcttttgggtccttttaagtgttaaaacagctttacttagctttttcaaaagcacttccctactagtttagcactcctctgaacccccctcaagtacatcccactttcagtccagtccctccacataatctaaccagtgttgaatggttggcacagcaggagacgccagggccctgcttttgtgtccattctaattgttagtgccatgccagtaaactcttaccctgcccacatacacaaattcctgtgccgctggcctttatgaatctgaggagactggcccagacatcatatgagctgcctctagcactgggattcctagatgggcacccctgtggacttctactgttctagtgcttatcagccagcctcttatcactgcttgctgccaaccaggggcctaaatgtggcaggggaaatgttgccccttgtggtggtgctggcattttgtaggtcattatggtatttctccagatctcagaggctgcagctgcccactgctgacaggcacatcacctggagccacccatatatatacacttgggggaaatacagcatcagcgagactctggttctgggaaagcttaggggcatggtaatggggatttccagggcattgactgggtgctgaggttccaacagcacagcagctgctctgttggatttaatgggatgcttttattaaaaaccactgactatgacagctttacttataaaaatgagagctaatacaacatagcacttgtttttaattttaaaaaactagaatattccagttttaaagaagaagaaatataagatagttatttcaaaattaagaggttatttaaaactccaatggcagagccaagatttgaagcccaggaatagatcctataattttaattcctatgcataaagccatactgtgtctgatccagttaattatatcactagttgataatataaataatattttaaaggactataaaatatgaatatatttgctgttcagcagaagctgagaggagtcaataccatgaacagtattaagagaggagttactgtgcatgacccacatgtccttccaaagccccaaaaccagaaggtatctcccgttgaaagggcttctggaatagggcttgatggcaagaggtgcccactaagccccactccatccatgcctcaaagtaaggcagtcaagcaaggaacattgccagagtcaacaaaggttgatgactaagaaatagaaatgatgccggctgctttgttaagacctgggaatccacagagcattatctagtgaaatttgtggcactactagcaaatggagtctccagacagctaacttaggtgaaaatggagtttgtgtcaccagaaaagattgtaaaaaaaatcaagtctagtacatctatggttgactcaaaccaacaggacagagaacttctggcaataccatcttaagtataaagtatttgcacccctaccctggggtctgtccccacaactctcatctcagggataattttgaaggaccccagatgtaggaaatggtacccatgggcacttccctactgaatacgccaaactgactacttcatgagtccgtctagtacaaaggaggggaatcatcaaagtgttggtcctatcatttcccttaccatccccatccagcacagatcactatgtgggtgatcaattacatcttctaaagatttattttgctaaacagaagattttatagtagctctcttgctttatctacatcagtgtatattggatatggtactgaggattaaacttaacgttgagttcataaattgcagaacagtgagacagtgacatcacttggagattgtggtccatgatccctgtggacagcagtccacaggttatggaagggcaaagcagttttatggccaattattcatctcattatataattatcaccatctaaaagtgataaactacttcatggaaataagaaagtatttttctgttggttaaaccctattgggtaaagcacaaaattgaattttctattacaacataaaagaaatgtagattatgtctctaaagtatgttgtaattttcttctgagatggagtctcgctctgttgcccaggctggagtgcagtggcacattctcggctcactgcaacctccacctcctgggttcacaccattctgctgcctcagcctccccagtagctgggactacaggcgcctgccaccacccaccacgcccggctaatttatttttatttttattttttatttttagtagagatggggtttcaccatgttagtcaagatctcctgacctcgtgatccacatgcctcggcctcccaaagtgctgggattacaggcgtgagccaccgtgtctggccaaaatatgttgtaatttacaaatgatacaaggcttggaaaaagctctaacaatttgtcttgttctcattggtgcagcagagaataatctaaatactctcgtaatttttttctgattatgaaagaaatgcttactgaagaaaatgagaaacagaagagcataaagataaaaattacccataatctcataacttttctgacagtttcataaaattagaaatgctagtttggcaaagaatttctttttaagactttctataccataactatgaaaatatctttgatccaactcagattaaatgagtaaaatagatcttgaatactttctgacttcaagtcttgtttattcttgaataaaaacagcaattcatggtattttacacatttattcatgcaggacaaaaatttgtatacaattaaggctaaaattaaacaattttttatctaaaacatgcaactcagaggacatgctacttcaatttcccagtaagaaagaaaaggaaatcattttacccaaatgaaatgattttttaaatgattgatttggccttgtgttttcctgccagcgtttttacatttgaacaagagcaggaaatgttttcattcttaatctttcaacttcagtctgtagtattgaaatctgttcagcttgttgttttgaaatatttgttaacttctgctgttgcatcatgttttcataccgttctttgacaatcttttcacaagtcagtttagaccctatcccaaaaatgaataaaggaattcgattatttatcaatactttcaaatacagaagcagcactcagaatcatacatgtggaagaaatgctggtagcaaaaaggcatatgcacttgtatgtttacagcagcactatcacaaaagcaaagacatggagtcaccctaggtgccccatcaacagtggactggataaagaaaatgtggtacatatacaccatgggacactacacagccataaaaaaaagaatgaaataatgtcctttgcagcaacatggatgtagctggaagccattatcctaagcaaattaacacaggaacagaaaaccaaataccacatgttctcacttataaatgggagctaaacagtggatactcatggacataaagatggtaacagggaacacttggaggccaggtgtggtggctcacacctgtaatcccagcactttggttagctgaggtgggcggatctcttgagctcaggagttcgaggccagcctggccaacatggcaaaacctactctctacaaaacatacaaaaattagccgggcatggtggttcctgcctgtggtcccaggcacttgagggggctgaggtgggaggatcaattgagcccaggaggtggaggttgcattgagccaagatcataccactgcactgcagcttgggcaacagagggacaccctgtctcaaaaaaaaaaaaaaaaaaaaaaagaaaagaaacactggggactactagagggaggaggcagggagggaggaagggctgaaaaattatggggtactatgctcagtacctgtgtgacggaatcattccgtaccccaaacctcagcatcacacaatatacctaagtaacaaacttgtacatgtactccctgaatctaaaataaaagttgaaattattttaaacaatgtatttttaaagaaatgctgatagctttttaactgttgtatacattttaggattactgattacttttaaagaaacctacagttggttaaagaaaaaaaagcatgcttacccattgcattacagatgtcttttctctctgagacagctaccaactcttctcgtagattgcagcttagggcataatttgctatatctttttgattgctgaactttccaagttttttgagtagtttcttgcagttttccacattctttttgtgcatctgaaatttttgttcccatgacaccccacaaaattaattttgaaaaatgtaatttatcctataaagacattattcttatattttaaatacattatcatcattaagataacatcttaccgccatatctgtagtgcctggcatagtaggcactcgagttatttgttgaaaggtagaatggtatgttaataacaaattttagaaaaaacattttgtatattcttaaactgagagaatattttaaaagcttgagattgctttgtttctaatatatgctacataataaaaactgaccatttttattcagtgatgattaaataaaacctttccaatgccaaggaaagactaccaacactcctattacataaatcctaacctaatgtaaaatagaaaatccacttacactcagatatgtccccaggggttaattctaatattaaaggaagtgcttaattttatttcattagttgcggttgcaaagatactacttagggacttttaattacctcatgaatactagtaaataaccaagattttattagggtctaggtaaattcatgatttgaaacactattactttgctcaaatgatttacaactgttaggatataataaccaacgtctttgagacttaccttatctaaaacagcaatggtttgttccattattccaatctgaatactaatcagagcctcatagtttggttcatttaggtactttgagattaaaaaaaaacatgtaaggatatttttctctctttcaatagatgact

SEQ ID NO: 6910 - DNA, 45656 bp, Homo sapiens
  misc_feature (1)...(45656): n = A,T,C or G, or insertion/deletion polymorphism (see Tables 1-2)
gtacagacaaggatacatggcagagagatcagctactttatcccaaatgcttcccagacattaaatcctaacggacactaagccctccttaggctgtataggagtggggtccctatcagaatttccggcaacaaaagtccctctccttgggtttgtttttacttgctgacctgcgtggctaggtgctagaaaatcccttatctgagccaagtgtgtccagctatgttccaggaactgctcctagtgaggtatatgtactaattcatgtaactatctcaaaaattaaataaggtaagtattattgttatccccatttttcagaagagcgaaaaaacaaaaaaatgaagtgattttcccacaaagttctatcactagggagctgcaaaacaagattcaaaccttggggcatacttaagagcactgaacaggtttgagccaaagagccattagagggccagagccgggtcctgaaccaacaatagacggagatgtgctagacacactggaggtgctggggtataagggaccattgctagaggagcaagcccttatgaaggcagcagagtggactatatgtaggagcatatacggtataggattatatatataggcttttatacaggaagaaggtggtatatactgtaaaggaatagatatataaactatataaattcctatacaggatatggttaggctttcaaataaaatcattatgcaacttggaagaaagtatgacttctgctggaagagatgatctagagagcttccagcttgaggtaaatgatttttttaaaagaaatggcatgtccatattctgtactcatatcaggagatactaaagatcattttaaaaaaggaggactggctgggtacaatggctcacacctgttatcccagcactttgggagaccaaggtggacagattgcttgagtcccaggagttcaaggccagcctgggcaacatggtgaaccccatctctacaaaaaatacaaaaatcagctgggtgtagtggtgcatgcatgttgttccaactacttgggggcctgaggtggaagaattgcttaagtcaaggaggtcaagcccacagtgagctgagatcgcgccactgtaaataaaaaaatataaaaaggactgtttgaaactcctattatttttaagtacagaacttgaagcttcacagatattacagaacaagaaacattaaaattctcaattagataaaaataatgaaatttatcaggaagttcaagttctgtgtgataaccttggtgtacccaagtaaacaacttctgacattctggttatgctaaaccaagtggaatcaaaggtgaaagacaggcaggacgcagtggctcatgcctataatcccagcactttgtgaggcagagatgggaggatctcttgagcccaggagttggagaccaatttgggtgacatagcaagatcccatcttatttcaaatttttaaaaattgttaatttttttattaaaattaaagaaaaccactctgctgaaaattaatttaaatttgaaacaggcagaacaactggaaagagtcaatgatgctctttcctgtgaacatgagtgcctctagcgaatgttatgaaacaattagatgcggcaatacagtccgttgcacggtgtgatacagccaaggtaagaaaagatgacacagcaagaatttaccagcctcagtgttatgctttgtcacccaagacagcgattataatggtgcatctacttgctgctcatgataatctatccaagatcattaggacaagcagtggagccagccagatgatggcatgtgccattaataaggtgctgatgggaagggtgcctgacaggggaggctggccaaatgaaattgaaccaccaccctctgaaatgcccccttggcaaaagagacaagaaggcagtggcggaaggggtggttggggtggtggttgtggaggtagaggtggtagtagaagaggctgtgggggtggaggtggaagagttggctggggtagaggaggatgggaaagtggtgggggagagggaggaggtgggatggaggtggtaaaggaggtttctaaggcagaggagatgatggtgggaggggagattatggtggaaaagattatgtagatccatatggaggaggtggtgatggtggtggatataggagatactgaagactacaaaaattaaaaaccaaaaccaacaaacctcaagcgcaaaggaatagtctgccctcttatgtcacaagcactaactaaccacctctgccctttctcatcccttaatcattcagacaagatttccttgtttacttcctcctataaaaaccctaagtctatttcattttctttgaaaagattcctctgcattaatggatgttgtccttactacaatagcatgaaaaaaaaaaaaagtctccttaatgcagcttagcaattttccaggcttgatatcagtgactccatcttgggctattgactccatgctgagctgctgctaaactttgaggcccacgaagaaactgtgaaaaatatttccttcacaaacaactgttataaataaagttttggtgttgcaaaagaaatagcactcgaatataaattttctttttaattctcagcaaggcaatgtacttcttttttttttttttttgagacagagtcttgctctgtcgcccaggctggagtgcgtgtcgcaatctcggctcactgcaagctccgcctcccgggttcatgccattctcctgcctcagcctccggagtagctgggactacaggcacctgccaccacgcccagctaattttttgtattttttagtgttagccatgatggtcttgatctcctgacctcatgatccgcctgcctcggcctcccaaagtactgggattacaggcgtgagccactgcgcccggcggcaatgtacttctatagacgggtgcgccctcacagatggagcaatggtgagctcacacctgggcaagggaggggaaggggttcttattcctgatgcacgtggcctctgctgctgtgtcgttcccctgttggctagggttagaccgcacaggctaaactaattctgattggctaatttaaagagagtgatggggtgagcggtttggcaggaaaaatggttaaggcggggcaggaaatcggaatgagtcagggtggagcaggtgattgaaatgagtcagggtggagcaggtgatggaaaaaggttgctttacgaggaagttaagtttaaaagtaaaaggcaaagattgaccatactgacatattgattctttgaagagaaatttagaattcatatctaacacaaccgtttttgcaacaacacacaacccaagaaagctggtctcaatattattattattattattattttccgagacaggctcttactctgtcacccaggccggagttcagtggctcaatcttggctcactgcaacctctgcctcccaagctcaagtgatccccccatctcagcctcccaagtagctgggactacaggcgcatgccaccactcctggctaattttttttgttttttgtatattttttgtagagattgggttcaccatgttggcaaggctgctctctcaaactcctggcctcaagtgatcctccccaaagtgctgggattacaagcataagccaccacgcctgatccccaatctttttttgtttgttttgtttcatgagacagactctttctgtggcccacgctggagtgcagtggcgtgatctcggctcactgcaacctctgcttcctgggtttaagcaattctcccgcctcagcctcccgagtagctgagaattacaggtgcccacaaccacgcctggctaatttttatatttttagtagaaacagggtttcaccatgttggtcacgttggtctcaaactcctgatttcaagtgattcacccacctcagcctcccaaactgtcaggcctctgagcccaagctaagccatcatatcccctgtgacctgcacgtatacatccagatggcctgaagcaactgaagatccacaaaagaagcgaaaatagccttaactgatgacattccaccattgtgatttgtttctgccccatcctaacagatcaatgtattttgtaatctcccccacccttaagaaggttctttgtaattctccccacccttaagaaggttctttgtaatctcccccacccttaagaaggttctttgtaattctccccacccttgagaatgtactttgtgagatccaccccctgcccgcaaaacattgttccgcggagcctctcccaaaacctataagaattaaagataatcccaccaccctttgctgactctcttttcggactcagcccgcctgcacccaggtgaaataaacagtcttgttgctcacgcaaagcttgtttggtggtctcttcacacggatgcgcgtgacacaaagtgctggggttacaggcctgagccaccacacctggccacccccaatctttaagaatattctggccgggcgcggtggctcatgcctgtaatcccagcactttgggaggctaaggcgggcggatcaagaggtcaggagatcgagaccatcctggctaacatggtgaaaccccgtctctactaaaatacaaaaaattagccgggcatggtggcgggcgcctgtagtcccagctacttgggaggctgaggcagcagaatggcgtgaacctgggaggcggagcttgcagtgagccgagatcgtgccactgcactccagcctgggcgacagagcgtgactccgtcccccccccaaaaaagaaagaatattctgtatgtagtttttttgttttgtttctgacagacgcaaacgcactcttctagtaatgactaaagacttcttcgtttaattcaccaatgaactaatctgacaatttatgtaacaaataaattcctataaacataagctcccttgcccctctccagtggcacaatctctgatttgccatcctggttgcaaccttcattactaagtaaacgcttacgtaaaccttaataatgagattcgggcaatatgattaaatattggtttatttgagtgcaaagtttgaggatggcgacccggtaggacacagactccaaaagatgggggtcagtgcttcgaaagggagaagtttgagggtcgtttacacaggcagggtctgggaagcttaacaggatgtcaacattttccatagaaggttaacgcatagcaatttgattggttcaaggcagtgtttctttttgggaagggtctatttaacattccacattaaggatgtaatagtcaagcggtcatttatcttattcaatgcgtattttatctcagatgccatctggtctgagctgggaacaagaaaataagggagttaatctataacaaaaggtcggcaattaagaggtcgtgcttcgtgatctggtctccaaagtcaactttcctcagggactttcagaatccccaaatagactatccactttctttcacacttatttgcctctaacttgttgatttcttttttttttttctgttttttaagggttaacaatctcttgggtgcactctgacttccatgcgctttatagaaaaaattggtcctgaggccagcagcaacagtcggtctcaggaacttgttagaaatgcacatttttcagccccaccccaaacctactgaatcagcagttttgctggtggttctcaatctctctttaacgtgccctctgggtgctgcggatgcacgctgaaggtagaagatcgctgcaggagatttccgcgtcgggcagatgaaagcgctctgcaagcccgggtgttatctgcgggccgggtccgcggcttctctggtggcactaggaccgcggcggcgcggccctcgcagccaccgcctcgggcgtgaggcggagcgtagctgttcctggatcctgggcctggctcctcgacccgcccctggaggcggaccccacttgacttaaactctggggcccgggaggccgccggttttctccccgcttgccggggtggtcctcttccctttgtcggtaagtgtgagacgagcaccccgaggtccctccgccttccggggtccgggcggggcgggggccgggagccgggagccagaggcactcgcggtccgggcctgcgcgcggcgcagagcgcttttgttctgcggcaaagacgcagtcgcgggcggccccggaacccgggcctcgggccccgccggctcgcgcgtcccgccgtccgcccaccggagctgggccgggccgccgcgcttgcttctgcccgccgcrccggggccggccctgggcctccgcggatgccgagccttgcaccggagggcgggcctcgctggctgttttccctcattgcctggctctgcgcggtagaggtcgcgagtggcgaaggctaggacgcattttgtcgaactgcgaggcgcggctggtgaggcgggtgggtatgagagctgcttatgtttttaaggctttcctgtcgctggagtgaaaaagaaaaatctttttttttttttgctatttcccgagggttctcctcctccccggccctcttaagccgaagcctcctggaacagaattgctgtactggcatctatctccaagtggtccgcgaacgcttctgcgccggcgatggtttctgttcctcagcaatagttccttgaggcatttttaaatgcacaaacgcatacccatcttaggtgttctcgagggacacggattccctaagcaaacgtccttagggtcctgagttcagcagcaaactttcggggaatcatttccgtgaaaacaatttatttgtagtacatcgagtgcatactgtcttaacataaggatgtgtatgagcttgaggcgcattttcatttagtggcgggcgggtgcatttcagtaggcgggccgcagagcttgtttggggattgcatttttctgctaaatgtgttagctttaatcatgtttcagtcactgttaatgtgcatgcatgttaaggttttaggttttttcccctgtgcagtcggatttttttctgtttaatattaatccaataaagacaagtgcagagataaagtattattgttttgcagtgatactacaatagcggacctagaggagcgcacataaattctaacttaagtgaatggtattttcaggccagacctagtttctatttctgttacttaggacacttaataagaattcagtaaacttagcatgctttcagtgcagccataaaagaaaacagttttgcacagcagtgtcatatctagtaaacacattagcatgtgctcttttattataaaatgtttcttgctgtccctaggaccaaagaagtaaacactgtgtggagagggactgacgtgtttggagggaaatgggaatgtacacgataattaaagagtaaagttgtgctcaacggtaagtgtatcacctctaagaaacccgccctgatttaaccaggcggttattcacactcaactatggagtaattcacctattaccgaataaaattactagctcagtgaatcaacatcggttttaaattaaactgtgggtcacaatggaattgacagcaaagcttgagaagaaatgttgttggcatagtactgaaaaatcagttgttaatcttagcaaaataaggaaagaggtctttggtaagggaattgtggtggaagttacctgggcagaggtctgcttctgtctgtgctgtgtttatttgattgtttttattatattttattactgttggtggcacataggggaatgtggcrcagagcaccactctggraggatgcttcccgtgcagccaaagtgatcatgtccagggctttcatctgtaaccacaaagtgtgttaggaagtctcacctaatgattaagaccatggtccctgtaaccacactgctttggttcagatcttggctgtagcactcagccaaccctggaaaataaacctctgcctgttctctcatctataaaatggggacaagcactaatgtcataggattgttatggtagagttacatgagtttcatgcatatcacagttaaacagctcctgatgcatggtaagtgcccaataaatgttagctattgtcatgttagaggaaatagattttgtggcctgggacatgtaatgctgccttagcagaaattcagctggttcatttaagctctaaatttatgagctttttattgattaaacccatcactgtagatcctcttagattctcttttttgtaggtcttgttttgttaggaagtacctgtcactactggtccacatctggatttacctgcaggcttgtttggaataaaaaatgcctccaaattcctaggcaggacaaacttgccccaaagctttgttgttctacattatctctgtgattgtacaggaatctctcttccctcctagattatcagtgtcttggatataattggagctcaaatgcttagggaattgatttaatgttgcttaaaacgtatttgtaggccaggtgtggtggctcacgcctataatgccagcactttaagaggctggggcaggcagatcacttgaggccaggagttcgagaccagccctggcctcaagttggccaacatggcaaaaccccatctytactaataataacaaaaattagtcgggcgtggtggcacatgcctgtaatcctagctactcaagtggctgaacccaggaggtggaggttgcagtgacctgaagtcaccccatcgtactgcagcctgggtaacagagcaagattctgtctttttwaaaaaaaaaaaaaaaaaagcatttgtgaaggtgaatttcaagaatctaatcaggcctccctccctcccccattagaggcacactctattatgtaaaacagacagggagtgtattcattttgagataagtccaggataacagttgactaaccctggctatagatacgcaagttaaacattcactttggaagaagattgtgaagaaagaatcttggaccttgaggaattctaaatgctttgttgggtggcaactatgcaatacttacactattcctaataccttaagtgtacttgtaagtgaagagcaaagttggaggctgttgaggtaaataatctcaagtgagattggaactatacrttttatgctcctggttttcatgatcgcaaagatttaatgacagtaacttaagattctcttgatgtatcaaattacaaggtttcatttgtaaataaggtgattaaaatgacaaagtgtattaaaagaaattgtattgtccagtgaagttttaagaaacagaaaccataaggtgattattatttttcaagccccaaaggagaattcattagatgacatacttttaaagttcatggatcagggtcgggtgcggtggctcatgcctgtaatcccagcactttgggaggccaaggtgggcagatcacctgaggtcaggagttggagaccagcctggccaacatggtgaagctccatctctactaaaagtacaaaaaattagccaggcgtggtggcacatgcctgaaatcccggctatccgggaggcagaggttgcagtgagctgagatcgcgccactgtaccctagctcgggtgacagagtgagactctgtcttagaaaataaagtccatgggctggtcgcagtggctcacgcctgtaatcccagcactttgggaggccaaggcaggtggatcatgaggtcmggaaatcgagaccaccctggctaacaggtgaaaccccaaaattagccaggtgtggtggcatgcgcctgtagtcccagctaactcaggaggctgagataggagaattgcttgaacccaggaggggaggttgcagtgagctgagatcacaccactgcactccagcctggacgacagagcgagactgtctcaaaaaaaaaaaaaaaagttcayggagcgcaacctttgggttttgatggatccaggatctaaatccaaaagagagttttaaagatttgggacactgtatctttgagctctgctgtcctctgctttggttttcaggcagaccatccctccactgggcagccctgacatctccagatgcaagcagcttcaagttgttcagagcatgccttttgtaactatagttagagataaaattcataagccatttattcactcatttacacccagtgtacagtttcagtggtttttagtatattcagagttgtgcacccatcaccacgtcaatttaagaatattttattacccccaaaatatctccatactcaatagtggtaactccccattttctccaacgcacctttccctaggtaaccattaatctacttctgtaggtttgcatattctgaacacttcatataattgaagtcataatatttttcatccagcatgttttcaaggctcatttatgttaacacatgtatgttacttcattcgtttttattaccagatattccgttgtatggatatgccacttttgcttattcttccatcagttaacagacgtttgacacgttttcactctttgactactgtgaatagtgcagctatgatcattcatagtgtttatgtagacgtgtatttttatttcttttgggtaaatacctaggagtggaattccttggttatgataactgtttaacattttgaggaactgccaggctattatccaaagtagatttaccactttattttttatttaacttttgttttatgtttgggggtacgtgtgtaggtttgggggtacgtgtataggtaaagttgygtcatgggggtttgtggaacagattatttaatcacccaggtattaagcctagtacccaattagttgtttttttttcaaatcctctccctcctcccacgctttgcctgcctataggccccagtgtgttgagcccctctacatgtccatgtgttctcatcatttagctcccacttatgtgtgaaagcatgcaatatttggtttcctgtgttagtttgctaaggataatgtcctctagctccaagctcctgcawaggacatgatctcattctttttttatggctgcatagtattccctagtgtatgtgtactgttttctttatgcggtttaccgttgatgggcatttaggttgattctgggtctttgctattgtgaatagacatgcacaattttatacagcaatgtttgagagatggttggtctacatccatagacacttaacttttatagccatagaagtgagcctgaagtggtagctcattgtggttgtgatttgcatttacctgatgattagtcatgttaagcatctttttatgtgcatgttgatttctttggagaagtatctattcaaaacttttggccttaaatttgtgttgtctttggattgtcaggttgtaagtttttaagatatcctggattctgatccttccttactagggaccataaatgtgagggtttactcctgggttctaggttctrttccattgatcaatgcctgtcctgtgtcagtactatatggtcttgtttattgtagttttgtcgttttgtttttttgttttttgtttttaagactgaatctcactgtgttgcccagaatggagtgcggtggtgtgatcttggctcactgtaacctccgcttccgattcttctgcctcagcctccaaagtagctaggattacagacacttgccaccacaccgcggtaatttttgtatttttggtagaggcgaggtttcaccatgttggccaggctggtctcgaacttctgacctcaagtgatcagcgtgcctctgcctcccaaagtgctggaattacaggcgtgagccactgctccctgccggctactcccttttcaacccctcctttttctgtgtcaaagttgctgagtggcagtcagaaaatgaaagtacctctgattggtcccctcccacaaccaatcaggctagtggctggccactacttcatttacataacgtgaatccatggtaaacctctagagagtatttaaactgcagaaaattatgtaacttgactgtcttgagccactgctgcccccgctcccaccctgtggagtgtgctgtcctttaaaataagtctctgctttggctgccttgcttgtgtggtttgttcagttctttgttcaagacgccaagaacctggacarctaccctcaactgcatggtttagaggaactcttctgttccactgaaggcattttgtctatctccagtggcagaaaattgactcactcataataggagcgatgaagaagcgatacttctggccaacatggtgaaaagccatctctactaaaaatacaaaaattagctgggcgtggtggcgtgtgcctgaaatcccagctgctggggaggctgaggcaggagaatcgcttaaactcaggaggtggaggttgcagtgagccaagatcacgccactgcactctagcctggtgacagagcgagacttcgtctcaaaaaaaaaaaaaaaaaaagaagtgatacttcgaatacagtttttacctcaacacagtgttgtcttaatatggtttgtacccgcctgccacacactgatgtgtcatgtatacttgggggtgcttgtcagcgcttttcagatatttaagatcaccagacctctagtacacggtgtgtccaatcttttggcttccctaggccactttggaagaagaattgtcttgggccacacataaaatacactaacactaacaatagctaatgagctttaaaaaaaattgcaaaaaawaaatcycataatgttttaatcatgcttatgaattagtgttgggcctcattcaaagccgtcttgggctgcatgctgcccatgggccgcggattggacaagcttgatttagtagatgtttccttgagttgggtatccagagggctccgaaatgaattacttggcagaattctcgtagggtaactggcttccgcttcatgtgttctctgttgtctttaattcccattttagggaataatacaaatagaaaacatggtctaaaatttgtctctggcttctctgctctgaaggcacaacagactagtgtcagtattctagcctgaatgatgatagtctgttgcattggtctgaacttcctgctggccagtcaagatgtgtgattgccagcacttcatgctgtacctgtgttaacgagtcagaaaaagtagagcaatttatttctcccttttttagggagaaagccctgtggctctcactggtgaagcttggtagttgggatatatttagcttacttggctctgcatggggaacgtttggtatgtcctccacaataggtgtgatcatcctgctgggaatcacgattgcaggcactttttaatccagtgttgcctaagacaaagtacaatggattaggatatctgattggatggcctgtggttctgaatagagtttgtagctggatacatgaaagatgggaaggcagagttgtaggtgaacagcttcaccgtggtgccctgatgacttgctcttctcatagaccatggaggcaaagcttaggcttaatcacaggctgacccatattctggcaggacaaccctgcaggtcctccaagaacaaagtgagagaaaagcagccctgtgagaaacagtcacaaagcagtttctcatctgcctccttggtttcaattgtgcataggactttaccaccttggggggtatacttgctggctataaaatggccacagtttggtgttctcatctggcttggtgtcatcccgtggggctggggatactgatcttgattttgctgttggacttagtaatatatgaatccatttggccttttgctgactgcagttacagaagcatagagaactgttctgccccttctaaccactgtgctgcaagagggaggattgckagtctttgttaatttgttgtgatacttaaatgagataaaagtatatgaagcattccacatagttctttacatacagattttcaaatgttagttgtttatagtagtacagatgtacctcagcttacgatggagttacatttcgatwacctgtattaagtagaaaatgtaagtcaaaaatggggttttatagacatgatgggatgggaaaacacaacatccaaaaaacttagctaacacagtacaccattgattggttttttgttttttttaatgtgccgtgggaggggcagccctgcacgcccgcccacccccaccccccacaacaccagcctgcctccgcaggggggatttttgttttttttgtgtgtgtgtgtgtttttcattgattgttaatgctcatgatcacgtggctgactgggtgctmtggcttgctgccaccacccagcgtggaagaatatcatactgcctatcacaggcccgggaaaagatcaaaattcaaagtacaatttctgctgaatgcctgtatcacttttgcatcattgtaaagtcaaaattattaagtcataccattgtattgtggtccaggaccatctgggcttagaaaaatggattctagaaagcctatttaaggactgataggctaattttttctgtgactaaggtgacagaaagccagagctagtacaggttgaataaattgtgttacatttggaattcctgaaaagtggctttttacactgaattgttagtattggtggtttgttaactttctacaggtatctctaatttttcgaatgcttatgttgcaagtcaggttttcaatgaaaaatagactttactcagtttaaccatatcagtggatactcttcaaataaactttcctttgtggaacataagaagtggaactttaaaagccataagggaagttttcaatttaaaataccagagcgaatttatatattttaggtataagaatagtattttaatgtatattatttatttcttaagtcctacgtcttttaggtactkaaatgcttacagatgaaatcatgctatgtctgtggttggcatagatagaaaaggaaacagaagtggtcaggactttttcccatctataagtttacattaggacttctcttttttttttttttttgagayggagtctcactctttcgcccaagctggactgcagtggcgctatcccggctcactgcaagctccgcctcttgggttcatgccattctcctgcctcagcctcccgagtagctgggattacaggcgcccaccaccatgcccggctaattttttgtatttttagtagagacggggtttcaccgtgttagccaggatggtctcgatctcctgacctcgtgatccgcccgcctckgcctcccaaagtgctgggattacaggcgtgagccaccgcgcccggcctaggacttctctttaatggggtgttcagataatgtttgtttattcagcaaatactgaaacctgctagacattatctacatgcatgtgtcttttgggttggcctgaaagacttttatgcctgtcgtattggctgttaatagtacttwgattcactctgatgatgttccacttacctttaataaattgtcaacccacttttctttcccttttttgagacagatcttgctgtgtcatccaggctggagtacagtggcactaccatagtccactgcactctcgacttcccatgctcaagtgatccttccatctcagcctcccaagtagctgggaatataggcgtgtaccaccacgcctagctagtgtttctatttttatttttatttttttgtagagactgggtcttactgtgttgcccatgctggttttgaactgctggactctgcctcagcctctcagcatgctgagattataggtgtgagccaccacacctggccagtggtaacccctgtgtataaaacaattcttaggctgagatggcttgagcctcaggagttcaagaccagcctaggcaacatggagaaacctcatctctacaaaacattaaaaaaattagccacacggtggcattcacctgtagtcccagctgcttgggaagctgtggtgagagaattgcttgagcccaggaggtggagttggcagtgagctgagatcgtgccactacactctagcctggatgacatagtgagaccctgtctcaaaaaaaataaaccaaaattcttgctgtggctcagtttatacttccatattctatttcttgctgttttatctgacctacagcagacctggccaccatgccatattcacaatattaggttcattttctggtttgtttggttttcttttgtttttgagacggagtcttgctctgtcgcacagtctggagtgcagtggcatgattcccgctcaccactgcctcaaccccctgggttcatccaatgcctcagccccccaagtagctgagaatacaggtgtgtgctaccacaatgctgcccaggttagtctcgaacttctgagctcaagtgatctgcctgccttggcctcccaaagttctgggattacaggtgtgagccactgtgcccagcctaggtctattttcttatrcttctttctattcatgtgtatgtgtgcttgtgcatgtgtgtttaacatggatagtaatatggttatttcctataggtataattttagattattttttgctttataattttctgtagtaagcccaatttacaaataaaggaagctgctgggttgacaacttttcagttatttgcattgtgtggatatagaatattttttaaatttcacagatattgttaatcttagtgagatctttaatatgaaagtccacatccataattatctttatgctttcttgcagctgtttacttctaattatttcctgattcacaaattaatttttgcaattcacaacttcaagaatacttggactattggattcaatccatagtaatctgcaaaagaagagaagcagaattatacctagaagtctactaatggacagttagtcacccacctacatgttgaggtactctggacctttttctttcacctcactggaagggaatgtgggtgggaatttaagacatctacttccttgttgattttccacctatttgttctattcattgttgaaagtagggaattgaagtcttccactcttattggtgaattgtggtttttgcttcttgtattttgatgctcttttaggtattaataacctacagatcacatttgacagttttaagtaaacaagcttccagattaacttgctttggggaggtattgtgatacaagatggtgacatcctgtccttgagtaaagaatcttacacattcctcaaatgggtatactgattaatgcataacctaacactcaaaagggtgctgctttatttgtaaatcaggttttattgatgcaagttttcttgcacttagacattttagcctatatgttgcaatcagtagccaatgattataacctcagtattgtatcctccaacgaaaaaagacaatttgagtattaggagtccccctcccttctcctataatttcatataaaagccttccaacttgtagcggactccagaacactttgaactctgttggtatgtcttcccagattgatcctcacatttggcctccagtaaacctttatcagattatttctacctcaagaaccttcgttttagacaacagtgcatatatgtttgtaattgttaccttgatgggttgatccttttatcattataaaatgcatctctttatcagcattttttgtcttagtctgttttgtctgatactagtataggcattcctgctttctttttttgagacggagtttcactcttgttgcccaggctggagtgcagtggcacaatctcagctcactgcagcctccgcctcccggattcaagtgattctcctgcctcatcctcccaggtagcagggattacaggcatgtaccactatacctggctaattttttgtatttggtggagacggggtttcaccaggttggtcaggctggtatcgaattcctgatctcaggtaatccacccacctyggcctcccaaagttctgggattataggtgtgagccactgtgcctggcctgcattccagctttcttgtagctatttgtgtgataytttttcatcattttactttcagtctgtgtttttggatctaaggtatatctcttggaaacaataacatatagttggatagtttttaaaatccagactgacattctctgtcttttggattgtgatattatgaaatatatctctggtctttatccctgttttcaggcatacactcctaaaattcgagcagtctccaaagtgataaatgtcttttttgtatgctaatgagttgacttatggctgacatcccctagtttcagaatggagggctggtcacctgaaagaccaaggcccgattaaagggttgggacttttcagccctacccctaattcctggtaccaattgtctatcttagtccattttctgttacttatagcagaataactgaaacaggggcctttatgaagaaaaggaattcatttcttacacctttgaaggtgcacctggttgagagggagggggtgaggttaagttgatcaccaatagccaatggtttaattaatcagatctgtgcaatgaagcctccataaaaccggaaaggatagagtttagaaggcttttcaggttgctgagcaggtggaggttcctagagggtggcgtacccagggagggcatggaaatgctgtgccccttctcatgtgaccttgccttctacatctcttgaactgaatccttggtaatatactttataataaactgataaggtgtttccctgagttctgtgagctgctctaacacgacaaaccaaaggagcgggacatgggaatcccagtttacagctggtcggtcggaagcacaggtaaaataacctgggacttggtgttggcatcagaagtggggggcagtctcggctgggcacagtggctcacgcctgtaatcccagcactttgggaggccgaggtgggtggatcacgaggtcaggagatcgagaccatcctggctaacatggtgaaaccctgtctctactaaaaatacaaaaaattagccaggcgtggtggtgggcaccggtagttccagctactcaggaggctgaggcaggagaatggcgtgaacctgggaggcggagctcgcagtgagccaagatggtgccactgcactccagcctgggtgacagagtgagactccgtctcaaaaaaaaaaaaaaaaaaagtgggggcagtcttgcaggactgagccctaaactgatgagatctgacactatcttcatatagatagtcttggaattaaaatgaattagaggacacccacctggtgtgtacactgcagaactgattgcttgttatgtggggtgagacacccacacatctggtgtcagaagtgtgagaaagtttattcctacattctcagaattgtttatataaaaatgttattttttatataattacatttacctctaatgttttactttttgtttttatgtctcgtctttttattcctttcttattccttagtggggttkattttgcataaatgagtattttctaatgtagcattttaatttctctttgttttttctgtttttaatttctttaacgatattttcactgtattttttgtaacttcatggaagcacaaattctttttaaaagtattttttatattaaastatcagtgatggaggctggcagagatcttggggcgagaatttattytctcagagaaatggtagtgatggaccatggaaacttgtctatggtaatctgtgttagaatatattcttgaaagttctaagaatacattatatccacaagtagattatgccatcctagagactgcagctgacccttgaacaatgtgagtttgacccatgtggatccacatacacatggatttgacttttttttttttaagagatgaggtcactctctgttgcccaggctggagtgcagtgtacagtcatagcacattacagcctcaaacatctgggctcaaacagtcctcccatctctgcctcctgagtatctgggactgcatccacacactaccttgtctggctacacttggagtttcttctgcatctgccactctactgccaccctaagtcgtaatccctatgttgttcaagggtcgattgtattttcctttcacagtctatttgtgtagctagtaggcaatcttccaaaaacttcaatttaggtcgttccggagtgcttttcgagttttcagttttcttctatgccagtgaaggagagggatggaggaaaaaaaaaacccaaattaacataaagatagtttcccttcctacccatatgctctgtattaattgctagggctgtgtttgagataggaaaaccaaaacttcttcacacaactgaccacttcatctctggtcaccagaatgtatttggatttcttcccatccgcaaactgttttccagctgacaacaactgggtgtcctacaattcaattacatgttggcatcatctacctggagaaagcttcagatcccacaggttgaggactcagtcccacaagactgcccctgacttcgccagacctgtacttttgaccaacctgttacaaagaggggattgtcaagactccctccgtggatttgattaatttgctagagctcacagaactcagggaaatagtttacttattataaagcctattagatgaagagccaggtggaagagatgcatgggggaatgcatatgtgagcgcttccatgccctctccaggtgctgccccaccctacggtcacctctatgttaccagacactcctgttactcaggagattacaaaggtctcaggagctctgtgtcaggaaccgggttcaaagaccacgtattagtgcaaaagattgtataccccaatctacaagagttttaggtgccccgtgtctggaatcatgggcagagaccaagtatgtatttcttatcgtgggctactatgacagtaatgccacagactgggtggagaaatttatttctcccagttccggcggctagaagtccagggtcaatatgtttgatttctgttctcttgaagcttctctctcagtggcttgcaggtgactgtcttcttgctgtgtcctaacgtggtccttcctctgtgggccgacatcgctggtgtccctcttcctatgggggatactagtcggattagagccccactctaatgacctcacttaaccaattatctccttaaaggccctatctccaaatacactgagggtcagggctttcacttatgaattttggggagggtacaattcagttcatgagactctctcctccaagttgacgtaaaagccaggggacagtgagggggacgggcagttatgaagcatcattaattctccttagaagtgctgcttttcttctgtcagtgaacactgtgacccattctgcttccaaccttgtggactagtcaaagtagtgagaggaacagagtcctaacgcctgagagttgtaaaatgagtgtcagcatgtggtggctgccttttttttttttttttaacrgatagactttattttctagaagagttttaggtttaaagaaaattgaggtcaggcatggtggttcacgcctgtaatcccagcactttgggaggccaaggcaggcagatcatgaggtcaggagtttgagaccatcttggccaacatggtgaaaccccatctctagcaaaaatataaaaaatgagtcaggcatggtggcgcgcgcctgtagtcccagctactcgggaggctgaggcaggagaatcgcttgaacccgggaggtggaggttgcagatcgtgccactgcactccagcctgggcgacagagcgagactccatctgaaaaaaaaagaaaaagaaaactgagcttatagtacagagcattcccatrtaagagctttataggaacctcccatctccaaaactctaaggttccactattagcaacttggattagtcatactgatatgttattattaaagtccatcactaacattagagtttactctgtatccaatgggtcttatgggttttgataaatgcttaatagtatgcatctactattataagagagctttaaaaaataactttatgaaatcaaaacatacctaagaaagggtacaaatggtaagtgtataatgcagtggattatgtagggaacacacwtgtgtgtaagtatcaccctggtcaaaagcagtcttcatgctacttaactaccaattgctattccatcacactttgtaaaaagtaccactacagtccctagatggttggttttgtctgtgtttcaatctttatataaatggaatcatggattattctttaatctctggcctttttcactcagtcttgtgtttgttagattcatgttgcatatagccttttatttttgttactatagtgtttcattaatatgaatacatttctattttgtttgtttccagtttttgcttactgcacctaatgctgctggcagtgttataattatgcatttctgtttggtacatacctaggaatgaaacttctaggtctcagggcttgcatttattaacccttggtagatgatgccatacgtctttccaaagtgttggttactttaaggatcatgatatactcctatcaccattgtaggagagttccatttgttccattttcttgccaacatgtggtattgagagttgaaaaaattctagccattgtgtatagtattaccaccttatggttttcatttacatttctgatattcataatggatttagcacttaccaaaaattttgccatttaaatatagttgaccattgaataacataggaattaggataactgactcttgtgcagtaaaaaaaatccacatttaacttttgactccgccaaaacttgatcaacaatagcatgctgttcagtggaagccttaacagtaacatwaaacagttgataaacacatattttgtatgttacatgtattatatgctgtattcttagaataagcttgagaaaaggaaattttattaagaaaatcataagggattgggtgyggcggatcacaaggtcaggagttcgagaccagcctggccaacatggtgaaacccygtctctactaaaaatacaaaattagcctggcatggtggtgggaccctgtaatccctgctgctcgggaggctgagacaggagaatcacttgaacccaggaggcagaggttgcagtgagccgagatcgcaccactgcactccagtctgggtgacagagcgagactccatctcaaaaaaaaaccaaaatcataagagaatatatttactattcattaagtggaaatggatcatcataaaggtgtttatcctcatcacatttatcttaactaggcggaggaggagggaagagaaggggttggtcttgctgtctccagggtagcatagacaaaagaaaatccacgtataagtggacccacgcacttcaaagccacgttcaaggatcaactgtagtgtctcatacagtgtttaattaagcttcatgcttattttttattgagttgtctacatttttctttttacgtaattccctatataggctggatatgatctctttgctatgtattgcgaatataatcttctagagagtgactttactttttcacttccttaatggtgttttttgataaacagtggtgattaattttgatgcagtccgttttatggaccttttttcttattgttcattgtgccctgttataggaaccttcccctatcccgagggcataaagatattctcatgtttttttgagatggagtttcgcttttgttgcccaggcttgagtgcggtggtgcgacctcggctcactgcaacctccgcctccctggttcaagggattgtcctacctcagcctcacgagtagctgggattacaggtgtgtgccaccacatccggctaatttttgcatttttagtagagacgggggcttcaccatccatgttggtcaggttggtctcaaacttctgacctcaggtgatctgcccgcctcggcctcccaaagtgctgggatttacaggcgtgggccaccatgcctggcctgtttctggaaactttaaaacgataatctacctgggattgatttgtttgtatatgtctcttgstgtgtaattggataaggcttattttcattcgtggcatatagataaccaattgacctagcttcatgtattgaaaagaacttttttcctaactttgtcataaaacaartgtctatatataaaagtgtgtgtatgtcttcgctattcatgcttgttttgcatttccatggaaagtttataatcaagcttgttaccccaaaaaatcaaaaaatccactgggattgtattgactcttaattactttttctttctttctttyttyttttttttttttttgagacaagagctcattctgctgcccaggctggagtgcaaatggtgcaatctcagctcactgcaacctccacctcccaggctcaagtaatcctcccacctcagccttccaagtagctgggacaacaggtgtgcacacctggctaattttttttttgtatttttgrtagagacaggatttcaccatgttgttcaggctggtcttgaacttctgacctcaagcagtcgcccagctcagcctcccaaagtgctgggattacaggcaagagccactgcgcttgacctaaattttgagattattggcatctttaatgctgtcttcaaatatttgaacatggcatatctttacactcagctgtttgttagagatgtgacacatccttcattttctaagtatttttttaatggtattttaaaagattactgctgataatattcttgcattttgaccttatttttgggcattgtaataaacagtaaaacaaaaagatctctacatagttttggattttctgtataacatctgatactcagttttgtgttttcctctctgcttatactcctaatatttttttctttataccagctaggatctccagtaaaatgattaatggagggatagtggcatcttccatgttactatttaattgttttagctaccatttatcaaaagaagtttccatctttataattttttaaatatgtaggtatttggggtttttttttgttttttgttttttgttttgagacgggctctcgctctgtcgccaggctggagtgtagtggcgcaatctcagctcattgcaacctccacctcctgggttcaagtgattctcctgcctcagcctcctgagtagctgggactacaggtgcccgccaccacacccagctaatttttttttttttttttttttgtatatttagtagaggccggggtttcaccgtgttggccaggatggtctccatctcctgacctcgtgatacccctgcctcagcctcccaaagtgctgcgattacaggattacaggtgtgaggcactgtgcccggcagtatttgattttgtcagaaattcttatcttagatttttgaaatgatctcatgatttttttttttttttttgaaacggagtctagctctgtcacccaggctggagtgcagtggcgccatctgggctcactgcaagctccgcctaccgggttctcaccattctcctgcctcagccttctgagtagctgggactacaggcacctgccaccacacctggctaattttttgtatttttagtagagacggggtttcactgtgttagccaggatggtctcgatctcctgacctcatgatccgcccaccttggcctcccaaaatgctgggattacaggcgtgagccactgcacctggccccacagtacttctgacaccagatgtgtgggaattttttcccaactgaccaattctctccacataccaactgggtggcttgtgatttgattcagttctgacactgtctacctgatgttaccatcagaacccacaagttaaagggctcagtcctacaagactgcccccacttgaagctagtcacaagtccaggtttgtacttctgaccaactggctataaagcaaacaaggtatgctttctctgaggtcactaccttcccagcacttcagtgtgttctgttcaccagcccagaagctcggctcatcacatctcaatgttcaagagttttgttttttaaaaaaaacagccttactctgtcacccaggctggagtggagtggtgccaccatggctcactgcagcctcaacccccaggctcagatgatcctccctacactgccttctgttttctgagtaggtggctgggactacgggcatgcaccaccatgacggggtaatttttttttttttttaattttcagtagagacagggtttcactatgtttcccaggctggtcttgaactcctgggctcaagagatcttcctgcctcagcctcacagactgctgggattacaggcatgagccaccacacccagccaagactttttatagagtccaatctccagctccccccaccactttatggaggtcagtggttagaactaaaagttccaaccgtctaatacttggttttcctggtgaccaccagctgtatcctgatggtatctaggggcccccactttaagtcaccttagtagcatagactcaggtatgtgcatacagagttcattatgaataacaaaagatatttatgaattagtgtttgcttatgccagaaattttcttttccttttttttttttttttttttgaaacagagtcttcactctgtcacccagactagagtgcagtggtgtgatcttggcttactgtatcctccacctcccaggttcaagtgattcttgtgcatcagcctcctgagtagctgggattacaggtgtgcaccaccacaccccgctaatttttgtatttttagtaaagatggggtttggcatgttagccaggctggtctcaaactcttggcctcaggtgatccacctgcctctgcctcccaaagtgctaggattacaggcatgagccaccgcacccggccttatgccagaaatttactgagttcattaaggtaaccttgaatagccctggggagtttagactttgcgaatgaacaatgagaatgtttttaaccatatgtttgaacttccctttttttttaaattctcatttttattgtcatgttagcttttttaaaaaatgcagttagcatggattacttagaagaaagtctgttaaaaataagtaaaaacagaaggtgattggcatttaaatgtaacaaaaagctagctgtcattgtgtggaatgaatttctgttaaacacgttagaaatttcattgacacttgccttatttattgttgtatcctctattgctcctcttcttcccaaattaaagatgaggctgctctgaagattcagtaattaggatggacagtcagctactaattttcttagatattctatctaggcaaaacagcattttaataaaatatctttatttcttacagattcctgacattcagacaactgacttgtaactgacttataactgacttgtaatacactgctactatatcaaaccgacaatgaattggaatgaaaaaccaaagagtgctacattaccaccactgtatcctaaaagccagccaccttttttgcaccagtctttaataaaccaaattaccacaacatctcagagttctttcagctatcctggaagtaaccaagaagcatgcatgtatcccggtaattcaaatccartttcacagccactgctgaatatccaaaattatcctcaacaaatttctgtttctgataygcataatgggacagttgtggcctcacacacttcagtagaaagaataacatatgcaaatgttaatggacccaaacaactaactcamaatttgcagatgtcttcargagttacccaaaaygtatggttgaactcaccaatgaggaatcctgtgcattctcatataggggcaactgtatctcatcaaactgattttggagctaacgtacccaatatgccggcactacagagtcaactgataacatcagatacctattctatgcaaatgcagatgatcccttctaattctacacgacttcctgtagcttaccaaggaaatcagggacttaaccagtctttttcagagcaacaggttgattggacacaacagtgtrtatctaagggactgacttacccagattacagaccacctccaaagctataccgttactcaccacaaagctttttaccagattctaccattcaaaaacaaaactttataccacatacatcattgcaagttaaaaatagtcagcttcyaaattctgtattaactttaccatcaaggcagacctcagctgtaccatcacagcagtatgccacgcaaactgacaaaagaccwcctcctcctccttacaactgtagatatggaagccagcctttgcaaagtactcagcatattactaaacacttgtctatggaagttcctcagagtcragaaatgctgtcatctgaaataaggaccagctttcaacagcagtggcaaaaccctaatgaaaatgtcagcacaattggaaatttcactaacttgaaagtaaataccaacarcaaacagccttttaacrgwcccattagatcttctgtggatggtgttcagactcttgctcaaactaatgaagagaaaataatggattcttgcaatccaacttcaaatcaagtactggacacaagtgttgcaaaagaaaagctagtaagggatattaaaacattagtagagataaaacagaagttttcagaacttgcaaggaaaattaaaatcaataaagatcttttgatggcagcaggttgtattaaaatgactaatactwcttatagtgaaccagctcagaattctaaattgtctctaaaacaaactgccaaaatccagtctggaccccagataactccagtaatgccagagaatgcagagagacaaacaccaacagtagtggaatctgcagaaacaaataagactcaatgtatgttgaattctgacattcaggaagtcaattgcagaaggtttaaccaagttgattctgttttaccaaatcctgtctattctgaaaagcggccaatgccagacycatctcatgatgtgaaagttctcacttcaaagacatcagctgttgagatgacccaggcagtattgaatactcagctttcatcagaaaatgttaccaaagttgagcaaaattcaccagcagtttgtgaaacaatttctgttcccaagtccwtgtccactgaggaatataaatcaaaaattcaaaatgaaaataygctacttctygctttgctttcacaggcacgtaagactcagaagacagtattaaaagatgctaatcaaactattcaggattctaaaccagacagttgtgaaatgaatccaaatacccaaatgactggtaaccaactgaatttgaagaacatggaaactccaagtacttctaatgtaagtggcagggttttggacarcwmcttttgcagtggacaagaatcctcaacaaaaggaatgcctgctaaaagtgacagtagctgttccatggaagtgctagcaacctgtctttccctgtggaaaaagcarccttcagatactgcaaaagaaaaggagtgtgataaactcagaacaaacacaacagcagttggaatttcaaagcctgctaacatccrcgttaagagtccttgttcagttgtgggaaattcaaattctcagaataaaataagtaatccctcacagcagacagctttgtcgatggtaatgcacaattatgagtcttcaggtataaatataacaaagggaacagaacttcagatagctgtagtgtcaccgttagttctgtcagaggtcaaaacattgtctgtcaaaggaataacacctgcagtgttacctgaaacartgtatcccgttattaaagaaggcagtgtttgtagtttacaaaatcaattggcagaaaatgcaaaggcarctgctgctttgaaagttgatgttagtggaccagtagcaagtacagcaacatcaaccaagatttttccactaactcagaaggaaaagcagaatgagtcaactaatggtaattcagaagtcacacctaatgtcaatcaaggaaagcataacaaattagagtcagctatccattctcctatgaacgatcagcaaatctcacaggagtcaaggaatagtactgttgtgagtagtgatacrttacagattgacaatatttgttctctggttgaaggtgatacctcttacaattcccaaatagcaaagatattcagctctcttcccttgaaaatggttgagccacagaaaccttctctacccaatcagcaagggattggcwgcagagaaccagaaaaacaattagataataccactgaaaataaagactttggttytcaaaaagataaacctgtacagtgcacagatgtttcacataaaatatgtgatcagtcaaagtcagagccacccttagagtcatcttttaacaatcttgaaacaaacagagttattctagagaaaagtagtttggagcatgccactgaaaaaagcacagctaacgatamgtgctcgtcagctgctattcaggaggatatttaccctcaggaaatagatgcatccagcaactatactccccaagatcctgcaagaaatgaaatccacagtgataaggcacctgtcttatacctacatgaccagctgtcagaacttctaaaagagtttccttatggcattgaggctgtgaatacacgtgaaggttctgtgggccagcaaactacataccagacctcagaagatcaaactgctgataaaaccagttctgactccaaagacccagcagatcaaatacaaattacaatattaagctcagagcaaatgaaagaaatatttcctgaacaggatgatcaaccctatgtagtagacaagttggcagaacctcagaaagaagagcccatcacagaagtagttagccagtgtgacctgcaggcacctgcagctggacaaagtcgtgattctgtgatactggactctgagaaagatgatatccactgctgtgcattgggctggctctccatggtttacgaaggagtaccycagtgtcagtgtaattccatcaagaactcatcttcagaggaagagaaacaaaaagagcagtgttstcctttggataccaacagttgtaaacaaggagagagaacttctgatagagatrtcactgttgttcaatttaagagccttgtaaataatccaaagactcctccagatgggaaaagtcattttcctgaactacaagacgacagtagaaaagatacacccaaaacaaaacataaaagcttaccaaggacagaacaagaattagttgctggtcagttttcatctaaatgtgataaactaaatcccttgcaaaatcacaaaagaaaaaaattgaggtttcacgaggtaacctttcactccagtaataaaatgacagcatcttatgaacaagcttctcaggaaacscgacagaagaaacatgtaacacagaactcacgtccactaaaaacaaaarcagcttttttgccaaataaagatgtgtataagaagcatagttctttgggacagtcattatcaccagaaaagataaaattgaaactcaaatcagttagcttcaaacaaaaacgaaagttagaccaagggaacgtattagatatggaagtaaagaaaaagaaacatgataaacaagaacagaaaggaagtgtgggagctacattcaaattaggtgactctttgtcaaacccaaacgaaagagccattgttaaagaaaagatggtatcaaatactaagtctgtagacacgaaagcgagttcatctaaatttagtagaattctaactcctaaggagtatttacaaaggcagaagcataaagaagctctgagtaataaagcatcgaagaaaatctgtgtgaaaaacgtgccatgtgattctgaacataygagaccaagtaaacttgccgtgcaggttgaaagttgtgggaaatcaaatgagaaacacagcagcggcgtgcagacctctaaagartcattaaatggcttgacaagccatggtaaaaacctcaaaatccaccattctcaggagtctaaaacatacaacattctaaggaatgttaaagaaaaagttggtgggaagcagcctgataaaatatggattgataagactaaattagacaaattaaccaatataagcaacgaagctcaattcagccaaatgcctccccaagtaaaggatcaaaagaaattatatctgaatagagttgggtttaaatgcactgaacgtgaaagcatttctctcaccaaattagaaagttcacccaggaagcttcataaagataagagrcaggaaaataaacatmagacctttttaccggtgaaaggtaacacagaaaaatcaaacatgctggagtttaaattatgtccagatatcttactaaagaatacaaactctgtggaagaacggaaggatgtaaagcctcatcctaggaaggagcaagcccctctgcaaggtccagtatgattttcttggtggtgtctacaayattgtaaagagtcgtaggtcaatatttgggctagcacctctcatgctgtctgggctgctgggaaagactttaatgtgttatgccactacctagtatttgttttgcctggtaaaccartgtttcattgggcaatatttgttttgtgttcattgccaccttattgtaaattgtagaaaattggtcgtcatgacgagctatatgtaaaacttgccagatagaaatatttcagttagtaccaagaaggctgtactgtgaaaaacattccacattccttgtgggaatgtcagaaaagtgtcaagtagctagtaatgtaagagtcttggttttgttaattctcctttggacttgtaatttgaaagccctgtgaacttgaaattttgttctgaatgttagaggataagtaatgatgaatactgaagtctttttgttcatatggaaatgggtcaactaattgtcctctttgaaacagttgatggctgtgttatcactatagttaaaatggtaacatctagcctactcataagatagaagaaccttgaaagcagtattgtccagtgttataatttaaaatctttaaagccaagctggcagctatgaatattaggtagcttaatggtagacttctcaatgtagtgcaggaaggaaggagaaaattgataactagttgttcatggtactaagggaacatttagacatagtggatattatatgtaaagcattgtgctgagaaagattggaaaactaaaggatttgaatggaaattgaagtctttgctctgcttttctgactatatttgttggggttcataaaacaatagcataaacaggatatgttttcctggaaaagaagatagggatatattcattttgtaaaaaattggtgatttcaataggttctttcatttggatccttggaacttgaggtggggatataatgggaacattggaagtgggtgggggcaatgtagttttctatctcatgtgtcctttaatatctggagatgtattaacctcttcagttcatgtgaggggaacataattacrtagtaaagataaactcattttttaattgaggtaagcatttcaaatagaaatcatttttccagtcctttttttagagttgtgttacatgtggttatatctagggcctttcaaaatctattttcagcttacrtgattttcctttgttatagtactaaaggagatgattagcaatatctagagttctgaaaatgaatatttaaatagtttcaggaataaaaagtacaaaagaagactggttaaaatttgttgctacaaagaaaaggacacagaaagacagccaagagagaggtaaagtcatctttttaaatcttcattcacttatctccctatctggtatatggaaattggattatggttatgatatgattgtaaagtatgattttatccatgttcttttttttttttcagtcattcagtgtttgtgtttgagtggtaggaggacatttttgtgttgtcgtgctgtggaatgaaaggctgagctttattttattttaataggaaaataagtcttatcacaatgagttagctaagaggtttgcatattttacctgtataggaccagacagcaaatactttaggttttctgggtcataaggtgtctgtcctgactactcagctctgactctgtttcagggaaatggctgcagataatatgtagatgagtatcagctgtgttctgattaactatttatttatttatttatttatttattttgagacagagtctcactctgtcacccaggctggagtgcagtggcgtcatcttggctcactgcaacctctgcctcccaggttcaagcgattttctccctcagcttcccaagtagctgggactgcaggtgcataccaccacgcccagctaatttttgtatttttagtagaggcagggtttcaccgtgttggccaggccggtcccaaactcctgacatcrggtaatccacctgcctcggcctcccaaagtgctgggattacagacatgagacaccgtgcctggcctctaattaaactttatctaccaaaataggcagcaggctggacttagtttgccagaccctggattcaattatttacatgttaatttgattaatcttcaatacaatttaggcaaggatatttccattttatagatgagaggttacatcatttgacttaagtttcattgctagtgactgaatagggacttgaatctggtcccctcttttcaaagtccattaagtgtggttgaggtatagtcagccctccgtatctgcgtgttccgtatctgtggattcaagcaactgtggatccaaaatatttgggaaaaaaattaatacaaccataaaaatagaaacttaaaagacaatatagtataacaactgtttacatagcatttacattgtattaggtattaaaagtaatctagaaattatttaaggtatgtgtggggggtatgctttaggttatataaaatatactatgccattttacataaggaacttaagcatccccagattttggtatctatttgggtggatgctgcagaggtgtcctggaatcagtccctcttcaatacccagggatgactgtattttaataatgagaccggtcctagctgtgttatttgctgggaagggatttgggctgaggaccaactagaaaaagtagagctttgagtatttgatttttttttgagacggcatcttgctctgtctcccaggctggagtacagtggcacgatctcggccttgctgcaacctctgcattccaggttcaagcaattcttctgcctcagcctcctgagtagctgggactacaagcacactaccacgcctggcttatttttgtatttttagtagagactggatttctctcactrtgttggccaggctggtctcaaactcctgaactcaggtgatccacctgcctcggcctcccaaaatgctgggattacaagcatgagccaccgtgtccacccgaatatatgatttaattagtggagtgaaagtaccttgttgttagggtttggctttgaaaactaaaagctagagctcaagagtttttgtcttagttttggttcattaaatgggcaaagagggggctgggcacggtggctcacacctgtaatctcagcactttgggaggccgaggcaggcggatcatgaggtcaggagattgagaccatcctggctaacacggtgaaaccctgtctctactgaaaatataaaaaataagccgagtgtggtggcgggcacctgtagtcccagctacttgggaggctgaggcaagagaatggcatgaacccaggaggcggagcttgccatgagccaatatgtcgccactgcactccagcctgggtgacagagagagagtcttgtctcaaaaaaaaaaaaaaaaaaaataggcaaagaggggttcagagcctcaaaaatggagagcagcagaaactcaccaagagaaacaataagaagcacattttataaaaggaattgacaacggttgtgaagagagcttcaaacaaatacttagaagcaggcgtgtaaaaattgagtagaggccgggcgaggtggctcacgcctgtaataccagcactttgggaggccgaggcaggcagatcgcctgaggtcagaggttcgagaccagcctggccaacattatgaaaccccatgcctactaaaaatataaaaattagtcaggtgtagtggcacatgcctgtaataccagctattcagtaggctgagacgggagaatcacttgaacctgtgaggcggaggttccagtgagctgagatcggaccactgcactccagcttgggcgacagagcaaaactctgtctcaaaaaaaaagtcagttagcattgaaacatgcatatgggaaaaacttgcatcaatgaagaaatatactcttaatcagaacaggacaaataacctaaagaggagggaatgaagagcagtgagaggcctgacagtgggaaaacaatgcctctcgggttggaaggcagaaagccaaaaatgcgaaagatacaaatgggtacgaagattggagtaagaaraaagctccttggaaacaggagagacatgattatctcaaagagaaagcgagaggcatgtttggaatctgaagctgaaaacactcaaaagacagatacacagattgaccagaggcttcagagataggcatgagttgaatgacatgtgcagacagcacagcaggatgagcamtgcacggtgaatgtgaggctgaaatactcagaatcatgatgaaagaaaaacacaaaccaggtacactaaggcaaagctgggtgagacagtccaggagacaagtcatayagctttgtcatggcacaacaagacgcaaataggtgagacctaagggaggagaaaaaaatctcaggtgatggctacatgggcatttttatttacttatttttatttatttatttattttattttttagacagtctcgctgtgtcgcccaggctggagtgcagtggtgcgacctaggctcactgcaacctctggttcctgggttcaagcgattctcctgcctcggcctcagcctcctgagtagcgtgaaccacctcacctggctgattgttgtatttttagcagagacagagtttcaccatgttgtccaggctgatcttgaactccaacctcagtgatccacccacctcagcctgccaaagtgctgggattacaggygtgagccactgcgcccggccacatgggcattttttaaatgcctattaggggcgagtgaagctggttctggagaagggatctctgggaaatagtgaattatataccttagacaaagaggctggagaacagtgaaccaacyatgaagtgagagaaaaatgccatgaactcccaatctgctataaagaaacatacatctggcctggtgtggggcccatgtgtgtcatcccagcacttgggaggtcaaggccggaggatggcttgagcccaggagtttgagaccagcttcggcaacatcaggagatcccatctctacaaataactttttaaaaaattagctgggcatagtggtgcgcacctgtggtcccagctgcttggcagactgaggaaggaggatcacctgagcccaggagttgaggctgcaataagccctgatgcagcactgcactccagcctgggcaacagagccaagaccctgtctcaaaaaaaaaaaaaacccacaggagaaacagatgtctaaattcagtagcaaaggttgcagcaaacttgaagtcctaagttagggtaaagagatgaagaggaaatgacaagaatttcttggaaagcaacttagagacccatctggggcttcagtgttactaattctgaaagaaagcaarcgaaaaagtggaagactgcagcagatctaaagaactaacaggacagaatactccacccattcaggtagaaaaagacaaaacaagaccccattattcagaagaaaatagctgcagcaggaatgaaatgtacagatagtccctgacttggcagtggtttracttaggatttcttgactatgatggtatgaaagtgatacacattcagtagaaagtgtatttcgcatacccatacagcaattctgtttgtttgtttgtttgtttgttttttgagacagtctcgctctgtcacccaggctggagtgcagtcgtgtgatatcggctcactgcaacctctgcccagctaatttttgtatttttagtcaaaacagggtttcgccatgttggccaggctggtcttgaactggcttcatgtgatctgcctgccttggcctcccagagtgctgggattacaggcgtgaaccaccatacccagcctcaacatattttcaataggtgatgggtcattatgaaaaaaggacactgaagctaatgtaacactgaaatggtctmaagaaacaggaaactatagacatgttttagaatatccaatacatggcaagaccaaaatatgaaacctatccttttcatgtattgtttgggactgactcatatttgtactctttgtattgctaatttacatagctgtttaaaagrtcacattcatactaatgatatgcaatgatacattttattgagccaagagtaaggtagaacagaacagcccagggcaatgaggatggggcaaggaggcaggagtagaaaacagcccccaaaagaarggcaagatgtcacgtgtatataacttacaattctataagtgaagagctatggttctgaaacttttgcttaactccttgccttaattttttatccctccaatatatattttccctctgaattttgattatatattgatcacagctaacattgagaaataaagtaagtaaagtttttatttcccttagataatgttaattcaagactctcgaagagaagcttcagtgcagatggatttgagatgctacaaaacccagtaaaagattcaaaagaaatgtttcaaacctacaaacagatgtacctggagaagagaagcagaagccttggtagcagtcctgtaaaataattacaagatgtggttttgtaattgccactgggaaatttctttccttttctgttcaaaatatttcgctgaaactaatgagaaatgccatgataaagatttctcagagtttggttcycactttcattgtatttcattgaaagtgcttaattaaaatggcttgagaactttgggtagccatgtgtaagaratggatggtattcacmggggaaacaaggtatttgaatttctactttattgaaccagatttaccattattttaaaaggaatgcttatacaaatcaatttgaaattctacccatcttgagggaggaccgttcctcagttaaggacttgtttatttaaatgggactgtaaatatgttttggtttctaagctatattagcaaaatttatttttcaaaaatgcccactgtgatgtsaatgtcaaaatatattcttaagtgttttataactaattgtaaactttttttcagaagtcttattttatacttgtgaaactgaacacaattttgggacaacgtttaaacattacttttcatacttgaaataaacatttattttttaaaaaactaatttgaaaccttcacagctcagtttctttttggtttcctacctttaaaaggacgcattttggaaagtgctttcaaaagctgaaatgcgaggtggcttatgcctgtaatcacagcaccttgggaggctgaggcgggcggatcacaaggtcaggagatggagaccatcctggctaacacggtgaaacgccgtctctacttaaaaaaaaatacaaaaaattaccaggacaaggtgggaggcacctgtagtcccagctactcgggaggctgaggcaggagaatggcgtgaacccgggaggcagagcttgcagtgcgccgagatcgcgccactgcactccagcctgggcgacagagccagactccttctcaaaaaaaaaaaaaaaaaaaagctgaaatgtcacagcagttgtgccagtaggtatttttagattgcgttcacatgagaacacaaaaaaatttactaggttcaggaaatttcaagaaactggaaggcaagatataactttatttctagttttactttatgactacgagaaaagggttggagtttttgttttgagacagggtctcactctgtcgtcaaggctggagtactgcggtgtaggatgaatgttcactgcaatcactgctcctgggtttaaataatcttcccgtctctgcctcatgagtagctgggactacagtgtgctaatacacctggctaatttaaaaaaaaattatttaatttgctaatctttgtattctagtgtgctgccaaagtgagcacataattttgtttttttgtttgtttgtttttgtttcttaatgtttggagaatttttgtggtttttttgtttgttctttgagacgtactcccgccctgttaccctggctggagtgcaattgcgcgatctgggctcactgcaacctccgcctcccgggttcaagcgattctcctgcctcagcctccagagtagctgggattacaggcgcccgccaccacgcccagctaatttttgtatttttagtatagatggggtttcaccgtgttggtcaggctggtctcgaactcctgacctcaggtgatccgcccaccccagcttcccaaagtgctgggattacaagcatgagctactgggtccagcctgtttgtttttttttgagacggaggcttgctctgtcgccaaggctggagtgcagtgacgccatcttggctcattgcaacctccgcctcccgggttcaaggattctcctgccgaatagctggaatcacaggtgcccgccaccacgcccagctaatttttgtatttttagtagagacggggtttcaccatgttggtcgtcaggatggtcttgaactcctgacctcgtgatctgcctgcctcagcctcccaaagtgctgggattacaggcgtgagccatcttgcccaaccctgagcacataatttaaaaatacatacatttttggagacatgagattctaccctgttgtccagactggtcttgaactcctgggctcaagtaatcctttggccttggcctcccaaagtcctgggattacagatgtgagctaccacgcccagagcatgttggttatttttataaaatcttaatgttgtatatatatatataaaattttcatttgaaaactatgtacaaggtagaccaatggattttaatgaaacattgcaatttcttgtgcttttagctttcatattacaaccaacctttaggaaacaactacggtcctctgtcatttaatgacagggatatgttctgagaaatacatctctaggtgatttttttttttttttttaaatggagtctcattcttttgcccaggctggagtgcagtagcacgatctccactcactgcaacttccgcctcctgggctccagcaattttgcttcagcctcccgagtagctgggattacaggcacacaccaccatgccttgctaaagtatttttagtagagacagagtttcaccannnnnnnnnnnnnnnnnnnnnnnnnnnnnnnnnnnnnnnnnnnnnnnnnnnnnnnnnnnnnnnnnnnnnnnnnnnnnnnnnnnnnnnnnnnnnnnnnnnnnnnnattttttaaatagtaaaaatctataaatattgtcatgccaaaataaaagattgattcacctcaggtgatctgcctgccttggcctcccaaagtgctgggattacaggtatgagccactgcacctggccaattttggtcttgtgtgactatcctagaatgtactaggtttgtgtaaacctagatggtacaggttgaatatcctaaatctaaaatccagagctgggcacagtggctcatgcccgtaaaccccagcactttgggaggccaaggcgggcagaccacctgaggtcaggagttccaagaccagcctgaccaacatggtgaaaccccatctctactaaaaatacacaattagcatggtgtggtggcagatccctgtaatcccagctacttaggaggttgacgcaagagaattggttgaaccccggaggcggaggttgcagcgagtcgagatcacgccattgcactccagcctgggcaacacaagcaaaactctgtctcaaaaaaagaataaaatccaaaatgttccaaaatctgaaactttgaatgccaatgtgatactcaaaggaaatactcatttgagcattttggattttgcatccttggattaaggatgcttaggtggtgagtataatgcaaatattccaagatccaaaaatatctgaaatattttcagtcccaagtatctctaataaggtgtagtcaacctagatgtcctactgcatacctaatcactatggtgtatcttattgcttataggctacaaatgtggacatcatgttactgtactgaatgctgtaggaaattataacaatagttaagtatttgggtcttcaagcatagaaaagctactgtaaaaatgcagtataaaaaaaaatgatgccgggcacagtggctcacacctgtaaacccagcactttggtaggccaaggcgggtggatcacctgaggtcaggaattcgagaccagcctggccaatatggtgaaacctctgctctcctaaaaatacaaaaattagctgggtgtgttggcgcatgcctgtaatcccagctacttgggaggctgaggcaggagaatcacttgagcctgggaggtggaggttgcagtgagctgacgttgtgccactgcactccaggttgggctacatgaacaaaactccatcttaatgaatgaatgatgtacctgtattgggcacttaatatgaaccatgaatagcgcttgcaggactggaagttgcttgcaagtcagtgaattggtctgagcaagtgaatgtgaaggcctaagacattactgtatactactatcaactttatgaacactgtacacttaggcgaccctaaatttatttttattttttactgcaaaacggggtctctgttacccaggttgaaatgcagtgctgtagtctcagcttgctgaaacctccgcctccctgtttcaagcagtcctcccacatcagcctccagggtagctgggaacacaggcacgatccagcatgtccagctaatttttagtaactaaatttattctttaaaacttaaatagaacttagcttatggtaactatattaactttttaaacttttaacttaattttaattttggttttggttgtttttttgttttttttagacggagttttgctctgcctcccatacaggctggagtgccgtggcacaatcttagctcactgcaacctctgcctcccaggctcaagctattctcctgcctcagcctcccaagtagctgcgattaacaggtatgtgccaccacgcccagctaatttttgtattttaactaaagatagtttcaccatgttggccaagctggtctcgaactcctgacctcaggtgatccacctatctcagcctcccaaagtgctgggattacaggcatgggccactgcatcaggccattaattgtaattttttttattcatttcaagacagggttaagaaactgctaattttgtatttctggtagagacagggttttgccatgtttcccaaaacagtctcaaactcatgggctgaagcaatcctcccgcctgggcctcccataataaagtgctgggattacaggtgttagccactgtgcccagccgccaaatttttagctttttaactcgtaataacatggcttaaaacacaagcacactgtagagctgtacaaactttttttttgagacagagccttgctctgtcacctaggcttgagtgtactggcgtgatcttggctcactgcaacctccacctcctgggttcaagtgattctcctgtctcagcctcctgagtagctggtattacaggcatctgccaccacgcccaggtaatttttgtatttttagtagagatggggtttcaccgtgttggccaggctggtctcgaactcctgatctcaggtggtctgcccgcctcggcctcctagtgctgggattacaggtgtgagccaccacacccagccttttcaaaattttctttatactttttgtataagctcttttttattaaatttttttttaactttttttcaaattgaaaactaaaagatgggcacagtggctcaccaaggtcaggagatgactggacacagtgcctcatgcctgtaatcccagcactttggtgggccaaggtgagcagtattgcttgagtccaagagttcaagaccagtacaacatgctgaaacccggtctctaccaaaagtacaaaaattagccaggtttggtggtgtgcacctgtaatgccagctacttgggaggctgaggtgggaggattacttcagccctgtctccaccccgcccccccaaccaaaaaaaaaaaaaacagaaccaggaaaacattaaccttggcttccacgtagtcaggatcatcagtatcacttgtcttcctcctctacatcttgccccattggaaggtcaccaagggcagtaacacgcatggagctgtcatctcctgtgataacagtgccttctggaacacctgaaggacctggctgaggctgttttatagtttttgttttgttttgtttttgagacggagccccgctttgtcgcacaggctggagtgcagtggcgcagtcttggcttgccgcaacctatgcctcccaggttcaggcaattctcctgcttcagcctcccgagtagctgggacaacaggtgtgagccaccgcacccaagcctattttttaatttatttaaatttaaaaatattttttagttttttaaaaagtaggaagctgggcacagtggctcacgcctgtaatcccaacactttgagaggccgaggcaggcgaatcacgaggtcaggagattgagaccattctggccaacatggtgaaaccccatctctactaaaagtacaaaaaattagctgggcatggtggtgtatgcctgtagtcccagctactcgggaggctgaggtagaaggatcacttgaacccaggaggcggaggttgcagcgagctatcacaccactacactccagcctggcgacagagtgagacttcgtctaaaaaaaaaataagtaggaataaattaacgtacataaaaagcataacatactaaacacaaaccagtaacagtcatttatcattgtcaagtattatgtactgtatatatttttaagtcagatttgtaaaaatataaaactgccaatcttttctcattctcctggtaagtatttttcataaacatttatttggctgggtgcagtggctcacgcctgtaatcccaacactttgggaggccgagctgggtggatcacctaaggtcagaggtttgagactagcctggccaaaatggtgaaaccctgtccctactaaaaatacaaacattggtgggctcggtggctcatgcctgtaatcccagcactttgggaggccaaggctggtgaatcacgaggtcaggagttcgagaccagcctggccaacat

SEQ ID NO: 6911 - DNA, 12319 bp, Homo sapiens
aaattaaccaagcgtggtggtgggcatctgtaatcccagctactcgggaggctgaggcaggagaatctcttgaaatcagaaggcggaggttgcagtgagccgagatcatgccactacactccagcctgggcaacaagagcaaaactctgtctcaaaaaaaaaaaaaaaaaaaaagattacttaaaatttacttggaaacttaaaagtgcaccattaagtaactcctgggaccaagcagatgtcatgagaaaaattaagaaatatttgccacttcatcagttataagacaaaaaaaaattttttttaaattttaagacatacttaaattgagtgataatgaatgatatggttgggtctgtgtccctgcccaaatctcatgacaaattgtaatccccaatgttggaggcggggtctggtgggaaatgattggatcttgtacgcaaatttcccctttggtgctgttctcgtgatagtgagtggattatcaggagatctggttgtttaaaagtgtgtagcacctccccactctctctattcctcgtgctctggccctgtaagacgtgccttcttctcttttgtctttcaccatgattgaaagtttcctgaggcctccccagcatgcttcctgtacagcctgtggaaccgtgagccaattaagcctcttttatttaaaaattacccagtttccggtggcacacacctgtaatcccagaactttgggaagctgaggtgggtggatcacctgaggtcaggagttcaaggccagcctgaccaacatggaaaaaccccgtctctactaaaaatacaaaattagccaggcatagtggcgcatgcctgtaatcccagctacttgggatgctgaggcaggagaattgtttgaactctggaggcagaggttgtggtgagccaagatcgtgccactgcactccagcctggtcaacaagagcaaaactccgtttcaaaaaaaaaaaaaaagaaaaattacccagtttcaggtatttctttatagtagtgcaagaatggactaatacaatgaaaacaccaaacatcaggctgggtgtggtggctcatgcttgcaatctcagcactttgggagcctgaggtgggaggatcacttgaggccaggagttcaagaccagcctgggcaatatagtgagacccaattgctacaaaaaaatttaaaattagctgggtgtggtggcaagcacttgtattctcagctacttgggaggttgaggcaggcaggaggagcacttgagcccatgaatttgagattgcagtgagtatgatagtaccactgcactccagcctgggcaacacagcaagaccctgtctcaaaaaaaagacagttctaaaaaatgaacataaggtataaacaccaacattcaacatgtacacacacacacacacacacacacacacacacacacacacatgcagttggccctctgtatttgtgggttccacatctggggattcaaccaaccacagataaaaaatatttggaaactaaaaattccaccctgcgcttctggacctcagcaccagccccagggctgctctaggggccacatggctgaagggagcgcaaggagctaccagaggcagaatgaagagactgaagcaatgacagccacttattttgaggaattacgtgtcattgatgactatgccaaaacattttgtattagaattagtgatgatattgattaccccaaatggacactttgctcataggtgatgctactgaattaatatacaggtacagctccacctacttattagtaggtaagactcttggcttaaaggacaagaatgtgcagatttatcaaatgggcttgagaaaatacaattcagaatattggtgaaagtattctttacctgtgggtggagaaaataagagatgctcggccacgcgcagtggctcatgcctgtaatcccagcactttgggaggccgaggtggacggatcacgaggtcaggagatagagaccatcctggataagatggtgaaaccccatctctactaaaaatacaaaaaattagccaggcgtggtggcacgcacttgtaatcccagctactcaggaggctgaggcaggagaatcgcttgaacccgggaggcagaagttgcagtgagcagagatcgagccgctgcactccagcctgggcaacagagggagaaaaaaaaaaaaaaaacaactctaggggaatggaaatacctgatttccattccatttcattgagacactcacactgttaaaggaatattgccttttttttcttttttcttttttgattatataaatagagatgcgtctcactatgttgcccaggctggtcttaaatactgggactcaagtgatcctcccacctcagcctcacaaagtgttgggattacaggcatgagcctttgtgcctgacccattttttgttttgttttgttttgagacagaatcttgctctgttacctaggctggagtgtagtggcgcgatctcagctcactgcaacctctgcctcctgggttcaagcaattctcctgcctcagcctcccaggtagctgggactacagatgcctgccaccacatctggttaattttttgtatttttagtagagatggcatttcaccattttgcccaggctggtcttgaactcctgacctcaggtggtccacctgcctccagcctcccaaagcactgagattacaggcatgagccaccgtgcctggccctgtctggcctttttactgctttttatggcttattgaaatagcttgtattagtcctttctcatactactataagaacacatccaagactgggtaatttagaaaggaaagaagtttaactgactcacagttcagcatggctgaggaggccttaggaaactgatgatcatggtggaaagggaagcaaacatgttcttcttcacagggcagcaggaaggagaatgagggtcaagtgaagcagcaagctccttataaaactatcaaatctcgtgagaacttactatcacaacaatagcatgggagaaactgccaccatgattcaattacatcccaccgggtcccttacacaacatgtggggactatgagaactaaaattcaagatgagatttgggtgcagccacagccaaaccctataattctgcccctggcccctctcaaatctcctgtcttcacatttcttttttctttttttttttctttttttttttttttgagatagagtatcactctgtcaccaggctggattgcagtggcacaagcttggctcactgcaacctccacctcctgggttctagccattctcctgcctcagcctctgcagtaactgggactacaggcgcatgccaccacacatggctaattattgtatttttagtagagacggggtttcaccatgttggccaggatggtctcgaactcctgacctcaggtgatctgcctgcctcagcctcccgaatgctgggattacaggcatgagccacactgcacctggccgatgataaacctttgaaagctaaaaagcaaagagatgattgcagactaactcagaagaactgagaaagctgaattatgtggcaacagtagagaaaaattgaaaacagaaatgattatattgtagaatcacaaacagacccagatcttctacctgctctcatgctgctggatgactgtttctccctagtttcagcagaagttggagtctgtggactgggaaacatcaagtacagctgagagctttgataccaaacaaaaatggaggtttacacaatcacatgcttgctgattgctaagcccctgcctcctgcctcacagccttcatcaatcatttagtgcccaaaccatgtcagccagatctttaccctctaggaaggggattgtcacacctttctctcaggaatcaaagcagcccaagaggaaagaagagaaactgataagattacccaacaaataaatggccctacagtaaactcagaaatacaagagctctccatatactgcaaacttccaatcagctgtagtccttcattcctcatcgtaagaaaccaaaaattaccagaactctaaagtaagcctctatcatgcaagacaaaaagcacacaagcagggaaagcaccttggagaaacagaatactatgtggatgaaagaaaactaactcatgttcagtcaaagcttctcataaaagaccaggtgccggttgggcgcggtggctccctcactcactttgggaggccgagggaggtgtatcacaaggtcaagagatcgagaccatcctggctaacatggtaaaaccccatctctactgaaaatacaaaaattagctgggcatggtggcggtcgcctgtagtcccagctactcaggaggctgaggcaggagaatcacttgaactcagggggtgcaggttacagtgagccgagagcgccactgcattccagcctgggtgacagagcgagactccatctcaaaaaaataaataaataaaagaccaggcccggtggcttacacctgtaatcctagcactttaggaggctgaggcgggcggatcacttgaggtcaggagtttgagatcagcctggccaacatggtgaaaccccgtcggagtgagactctgtctcaaaaaaaaagaaagtttctcataaaagagcagcaaagaaatctgttatggttaaaacatagaacaaacaaataacaaataacaataactaaggaagcttagtttattagaaatgtgccaggcaagggagatagtgagcaaatggagtcagtcaaatggacgccgagtagctttaacatttgagttttatacagtttcactgaggaggcgttagccaaaggatgcttttagggcggggataacaagagttgggggaggggcaggaaggaagggtagagttagggcaggaaagaattggtcaaaagttgcaaagttgagtcactgactgtgttgataggctaggcaaggctgtctgtgaaaaagtctgtggttttgtttcctgaacacctgggtccaagctgagctgttgctgacatagtttatctgtcttgcaaattgtggtctctgtactgtttttcaagttgtggtttctgtagttttccatttctcagtcttgagaaagataagataagaaaagatactgcattctgaaaacaagaacaagatgttattttgtaaaaagaggaacattcagagaacaagaagaaattttagacgttaaagacatgataagaaatgaacattttaatgaagaattgaaagataaaattgaggaaattacacagaaagcgtggcaaaaagacaaggagataggaaatgagagaaaaaaggtaagaaaatttatgaactctatgaagttcagcagccaaataatagaatttccaggaagagtaaaacagaggggaagaaatcaacaatgaaatagttcaggctgggcgtggtggctcacgcctgaaatcctagcactttgggaggctgaggcgggcggattgcctgagctcaggagttcaagaccagcctgggcaacacagtgaaaccatgtctctactaaaatacaaaaaattagctgggtgtggtggcatgcacctgtagtcgcagctacttgggaggctgaggcagaagaatcgcttgaacccaggaggcggaggttgcagtgagctgagactgggccgctgcactccagcctgggcaacagggtgagactccatctccaaaaaaaaaaaaaaaagaaatagttgaagaaacacactcagaatagaagaaccaaattgaaagtgtccatcataatagatgaaaattgtcctgcactaaagcatatgattgtgaaatgtaaaatatctaggacaaacaggagattctcaggcttccagaaggggtagaagggtggcacaaaagggtggtgggggagtcggaattggattgggtttctcagcagcaacacaggaataagaaaagaaacaaactaaaagaggaaggtgtggctttcttttcctccgggacacagaaggtcgtccttcctacctactggctgccctcgggggcaaccccttgcccagcaccaaggaygtcaagaagatcctgtacaatataagcaataaggccaatggcaaccagtgcagcaagatcatcagtgagctgaatggaaaaaacattaaaggtgtcattgcccagggtattggcaagttgccattgtgctctcccacaaggctgtggccgcctctgctgccccggctctgtagctcctgctgctggccctgcccctactacaaagaagaagaaacatgagaagaaggagtcccaagagtcacatggtgacatatgatttgacttcctgctcccctgccaattcccctggaaagaaagaaagaagggagggagggaaggagggagaggaaggggagtgggggaggggaggggagggaaagggaagggaatagaagaaacaggagagacgcaaagtgatggcgaaggaaaatcacaggatcaaaaacagcaaatgtagaaagcaactgatccggactgggagaggcataactcaaaagacaggcatgttggggatttgttatccaccatttaaaaagataaagccattcttagcccatgggtcatacaaaaacaggctgcaggtcagttttctgaccccgatctagtcaataaaaaagaaacaggatgaactgacactaatttctggaaagaaggaaggaaggaggaaaggaggcaggaaggaaaaaaaagaagaaaggggccaggcgtggtgtctcacccttgtaatcccagcactttgaaaggccaaggcgggttgatcacgtgaggtcaggagtttgagaccagcctgggtaacatggtgaaaccccgtctctactaaaaatacaaaaattagccgggcatggtagtgcacccctgtagtcccaactactcgggaggctgaggcaggaaaaacacttgaacccgggagtcagaggttgcagtgagcctggatggtaccactgcattccagcctgggtgacagcaagactccgtctcaaaaaaaaaaaaaaaaaaaagaagtaagaagtaaggaaagaacaaaggaaggaaggaagcaagaaggaaagaaaaagaaaggaagaaaagaaagaagaaagaaaagaaagaagaaagaaaagaaagagaaagaaagaagaaaagaaaggaaggaaggaaggaaggaggctaggtagaggtgtgaccctggtattgataaagagataggggagtggtcaaaggcatttccctacatcatactgtaaggaaaattcctgggtgagcccacagaaacgacaggttaatccaaattataaactgagtaatctcattgtagagcctttgcataaatccaggatacctagttatccaatagtctccctggccagattgccaaagctttcgctgctctgggtcttcttcctcattgtagtccctgtcatcagggtttccacagcactcaactcattctccaagctttgactgcagtattcttcaggatacatcatcaatcatcttccctctgccttgacatggtgcttggcactgtgacccttgacacaatgttaagtgccttgacatattgctacactccccaaataagacttacttcaagtgaatatacattagatatctgcaggaaaaatgaagaagagcaagacagcaaccatcccttccctttaagaattcccttcaagaacaaggatttttctccatataacaagaatgtgattgcaaattgcttcacaaaaaagtaatctggcagagctgtaatctccactggcctctccaaaaagccacaaataaaatagcctttgatatagacaataaattgtaaatatcagtagaagcttccttagaagctatcttgatgatagacactgacttttttgtttatttttatttatgttatttccattgcattatgtggcaaaatatttcacattaatctaaccatcagtctgctttctatcactatatacaatatttgccttttctaaaattttataaatgtggaatgatatcgtagaatcttcggtgtctggctccttgtatttagcataatgctttttttttttttttttttttgagacaatcctgctaggctggagtgcaccagtgtgatctgggctcgctgcaacctctacctcccaggttcaagcgattctcgtgcctctgcctccagagtagctgggattacaggcgcccaccaccacacctggctaatttttgtattttcggtaaagacagactttcaccatgttggccaggctggtcacaaactcctgacctcaagtgatccaccccactcggcctcccaaggtgctgggattacaggtgtgagtcaccacacccagctgtcttcagcataatgctttcgagattcatacatgttgtgatgtgtattggtaggttttttgtttgtgtgtttctattttgttttggctcacaaacagaaaaatctaaagtagctctttttggtaagtagctttgcattgtatggatgtaaaacagtgtatccattcaccagttggttgtttccagttgggagatacatactatgaaaaaaactccaatgaacagttgcacacaagtctttgtgtggacatgttttcatttcttttggggaagtacgtaacagttggattgctgggtcatgtggtaactctgtctttcacataatcagaaaccaccaaactcttttcaaagtattcataccactgtggtttgtgtccctccaaaactgatgttggaatttaattaccatggcgactctattaagaggtgggaccaggctaggcatggtggctcacgtctgtaatcccagaactttaggaggccagcgcaagaggattgcttgaggacaggagttcaagaccagcctggtcaatgtagtaagaccccatctgtacaaaacatttaaaaattagacagacatggtggcacacacctgtggtcctagctactcaggaggctgaggtgggaggataccttgagctcaggaggtcaaggctgcagtgagccatgatcatgccactgcactccagcctgggcaacagagcaaaatcttgactctaaaaaaaaaaggggaggtgagaattttaagagacagaccttaagccctcatgaatggattaatcttttcatgaattaacagattagtggggttatagtggaagggaataagttatctcaagagcgggtttgtgataaaagccagccttgcactcttcttatcctgtgatgccttcacatgttatgacacagcaagaaggccccctgcagttgtgactccttgtccttgaatccaagcacttgccagtttccagaactttaccaaatacatttcgtctgggtgaggtggctcacaccggtaatcccagcactttgggagaccaaggcgggtggatcacttgaggtcaggagttcaagaccagcctggccaaatggtgaaaccctgtctctactaaaaatacaaaatttagccgggcgtggtggtgcctgtaatcccagctacttgggaggctgaagcaggagaatccctttaatccgggaggtggaggttacagtgaaccgagattgcgcggctgtactccagcctgggtgacagagtgagaccccttcttaaaaaaaaaaaaaaaaaagccagtctctgtggctcacgcctgtaatcccaacactttgggaggccgaggtgggcggatcacgaggtcaggagattgagaccatcctggctaacacagtgaaaccgccgtctctactaaaaatacaaaaaattagctgggtgtggtagcaggtgcctgtagtcccagctactcgggaagctgaggcaggagaatggcgtgaacctgggaggaggagcttgcagtgagccgagatggcgccactgcactccagcctgggcgacagagcgagactctgtctcaaaaaaaaaaaaagaaagaaagaaattttgttttattataatttacccagtctagggtattctatgatagcatcagaaaatggactaaggaacataccattttcattcttaccggcaatgttcctgatgctccaaattctcttccacgcctgatattgttagtctttttaatttgagtcattttagtgggtgtgaagtatagtttttattttcttattattatatttccataagttattgcggtacaggtggtatttgggggggtgtgaagtatatttcctcatggttttaattcacatttccccaatgaccaagtgatgtggagcatcatttcatgttggttttttgccattcacataacttatttggtaaaatgtatgttcacatttctctcttgttgttgatcattcttgccaaattttgtgtagtcttttaaaataactgctttgttccttttactttggatttattttctgtttttctgacttattataaatgattacttactaatataagtcttttaagtttatacatttattttttgtttgtttgtttttgtttttgtttgagaccgagtctcgctctgtcgcccaggctggagtgcagtggggctatctcggctcactgcaacctccgcctcctgggttcaagtgattctcctgcctcagcctcccgagcagctgggattacaggcacctgccaccacaccgagccattttttgcattttttagtagagacagggtttcgccatgttgcctaggctggtctgaaactcctgacctcaggtgatccgccctcctcagcctcccagaatgttgggattacgggcgtgagccactgcgcccggccaagtttatacatttctttctacacactacgtagctgcatcccacagttgtcatctgtaatactttttttttttttttgagacagagtctcgctctgtcgcccaggctggagtgcagtggtgccatctcggctcactgcaagctccgcctcccgggttcacgccattctcctgcctcagcctcccgagtagctgggactacaggcgcccgcccccacgcctagctaattttttgtatttttagtagagacggggtttctccttgttagccagtatggtctcgatctcctgacctcgtgatccgcccgcctcggcctcgcaaagtgctgggattacaggcgtgagccaccgtgcccggccgtcatctgtaatactgtttattacattcaaaatgtttaatttgtgtctttcttatttcctagcacataaaggaaattttttagctttttttattgtttatttgtagcttaatagcattatacataggcataccttattttattgcacttcattttatcatgctttctagattgtatttttgttacaaatcgaaggtttgcggcaaccttgtgttgagcaagtatatcagtgccatttttccaacagcatgtgctcacttttgtgtcgttgtgtcagcattttttactgataaactatttttaaaataaggtatatttttagacataatgccattgcatactaaatagactacattatagtttaaaaataactttatgtactaggaaaccaaaaaaaattgtgtgacttactttactgtgatgtttgttttattgcaatgatctggaactgaacctataatatctctgacatgtgcctatggtcagagaatgtcctcattttaattctgtcaattttcttgagatttgatttacagacaatctgtcttcaattaataaaaattttgcgtgcttaaaaagaatgtgatttttgcagttgttagtatagcgttctatgcttctaccatagtaaatatgtaatcatgtttatcaaatctactcgatgaacattttctgtcaattattaattttcaaatcctccaatatgattgaatataaatttgtctgtttcttcttttttttttttttggagatagagtctcactctgttgccaggctggagtgcagtgacgcaatctcggctcaccacaacctccacctcccaggttcaagtgattctcctgccttaacctcttgagtagctgggattacaggcatccgtcaccatgcccggctaattttgtatttttagtagagatggggtttctccatgttggtcaggctggtctcaaactcccgatctcaggtgatctgcccacctcggcctcccaaattgttgggattacaggcatgagccaccatacccagcttgtttcttcttgtgatgtttttgctttatattttttttaggctatgtttatatgtttacaacctatgtatatatgtttataacctatgaatatatcttaataaacctatgtgcataagtttcagtctatgtacataggtatgtctatgtacatag

SEQ ID NO: 6912 - DNA, 75327 bp, Homo sapiens
  misc_feature (1)...(75327): n = A,T,C or G, or insertion/deletion polymorphism (see Tables 1-2)
tcatgggagttatgtgctgctttaaccagtgactgtctatggtagggtacaaatgttctggtcccttgcctaagggcagacagattctgcttgcactttatgcttcagggctcccggtaggaataggctgagtctagacttcccctgaaaccattcttgctttccttcttcccctcccctggcctgcttccctccctcaccctcctagatttctacctagactactttcctaataaatcacttgcctacgaagctccaccagtctcagcttctagggaaatagactgaagacactcacgtatgcacaaaatgacatatacaagattatccattgtttcattcataatagaagactgttaacaagcaaatgttcatcactaggctcctggttaaataaagtacagctgccccaggaaggaaactaggggttcaggaatacggtgaaaagtaaactttcactgaacttttagttctttctgaatttttttttttttgagacagagtctcccccttgcccaggatggagtgcagtggcacgatctcggctcaccgcaacctccgcctcctaggttcaagtgattctcctgcctcagcttcccgagtagctgggattacaggtgtgcatcgccacacccggctaatttttgtatttttagtatagatggagtttcaccatgttggccaggctggtctcgaactcctgacttcaggtgatccgcctgccttggcctcccacagtgctgagattacaggtgtgagccaccgtgcctggcctctttctgaattttgaagcatttggatgtattgctttttttttttttgagacggagtctcgctctgtcaccaagctggagtacagtggcgagatctcggctcactgcaacttccacttcccgggttcaaacgattctcctgcctcagcctcccgagtagctgggactacaggcgtgcaccaccacgcccggctgatttttatatttttagtagagatggggtttcaccatgttggccaggctggtctcgaactcctgacttcagatgatctgcctgcctcggcctcccaaagtgctgggattacaggcatgggccaccatgcctggcctgcttattttttaaaaaaataaaattaatgttaaaataattaattaaggctgggcacagtggctcacacctgtaatcctagcactttaggaggccgaagcaggtggatcacttatgcccaggagttcgagaaccagactgggcaacatggtgaaacctcatctctacaaaaagtaaaaaaattaaccgggcatggtcgtgcatgcctgtgttcccagctacttgggaggctgaggtgggaggatcacttgagcctgggaggtcgaggctgcagtgagctatgattgtaccactgcactccagcctgggtgacagtgagattctgtttccaaaaaaaattaattaatcaaaaaatccactaaacaagtaaattggatacttaggtgaaaatcttaagtgtaggccgggtgcagtggctcacgcctgtaatcccagcactttgggaggccgaggcgggtggatcacaaggtcaagagatcgagaccatcctggctaacatggtgaaaacccgtctctactaaaaatataaaaaattaaccgggcgcggtggcgggcgcctgtagtcccagctactccggaggctgaggcaggagaatagtgtgaacctgggaggcagagcttgcagtgagccgagatcgtgccactgcactccagcctgggcgacagagcgagactcagtctcaaaaaaaaaaaaaaagaaagaaaatcttaagtgtaagtacctaaacaatctattaaatgacctgtgaaaccaagggctcctaatgctatgaccaaagactgaagctctctatgagatgccagccactcaatagtgcactttttctgagaagatataagacagccactcagaattatgatgtaataattggtaatgtggggaagtaaataaatgtctcaaagttttgcttttgaaaaatgactagtaaatagtaataacaaaactgttatttatggagggatgagtctgtggcctatctctcttcccttttatgtctacgtttctcacagtcatctacactccctgtcacttgtacttattcccttgacactgcaatctagcttcatccactcccccaaaatgactcttcccaacgctatcaatgacccctttgtctttccatccagtggctgtttttcaatcctcgtattccttaactctcagcagcattctgtgacatgatgctctcctggtgttctgcctgcatctctgctcatttctttttagactcctttgtcagtttatgctcttctgccagtctttttttgagacggagtttcgctcttagtccaggctggagtgcagtggcgcgatctcagctcactgcaacctcagcctcccggggtcaagcgattctcctgcctcagcctctccagtagctgcgcctgccaccaggcccagctaattcttttcttcttttttttttttttttgagacagagtctcgctctatcccccaggctggagtgcgtactctatcccctaggctggagtacagtgtcgcaatcttggctcactgcaacctccgccacccaggttcaagttattctcctgcctcagcctcctgagtagctgggattacaggcgtgtgccaccatgcctggctaattttttattttttatttttgaaatggagtcttcctctgttgcccgggctggagtgcagtggtgcgatctcggcctactgcaacctctgcctcctgggttccagtgattctcctgcctcagcctctcgagtagctgggactacaggtgtgcgccactgcgccaggctaatttttgtatttttagtagagacagggtttcaccatattggtcaggccagtctcaaacttctgactttaggtgatctgcccacctcagcctcccaaagtgctgggattacaggcgtgagccaccatgcccggccaatttttgtattttttaattagcaacggggtttcaccacgttggccaggttattaaccacatccatggctctgattaccacctgtggataaatatgtccccagttctcctctgagctcctattttcctttttttttagagggtctcactctgtcacccaagctggagtgcaatggtgcgatcatggctcattgcagccttgacttccagtgctcaagccatcctcccacctcagcctcccaagtgtctgggactacaggcatgagccaccaagcaccagctaatttttgtatttttttgtagagaaggggttttgccatgttgcccagactggtctcaaactcccgagctcaagcgatctactggcctcggcctcccagacagctgggattacaggcacaagccaccgtgcccagcctctgagctcctattttccttttattattattattattattattattattattattattattattattattttgagacggagtctcactctgtcacccaggctatagtgcagtggcacgatctcggctcctgggttcaagcctcctgggttcaagtcattctctagcctcagcctcccaagtagctggggctacaggcatgcaccaccatgcccggctagtttttctatttttagtagcgatggggttcaccatgttagccagactagtctcaaactcctgacctcatatgatccacccacctcggcctcccaaagtgctgggattacaggcgtgagccaccgcgcccggcctgagcgcctatattcaactgcacatttaacatttccacttgaatatcccattgaatggcaccaacattcatccaatttctcctttcaggagcttggggaccatctttctcttttagtattcatatctaacaaatcaccaagttccatcaattttatcatttaagtatctttctaatctgttcatttccttccatctatactgtcaccaccctcattttaactaccttatagtttctcacctgattagtccaaaagccttttaacttcctttctgctttcaatcttgttttttctctattgcattcctcacactgcacccagaataatctttttaaaatgtaatgtcacactcccttcagtaaaatcttgcctttgattttcagtgcatttcaaatgaagtccaaagttctcaccatgaactccagtgctgtgtgatctggcctttgcctgcctctcccattttgtttcacagccctctccctttggctccctctaggttccttcctcagcagtggttctttattgtctcagggcatctgcttttgttgtttcacagttgttaacattcttctttctgctttcatgtatttggccttttctcagtgttcaagtcttggatcaaatgtcacttcctcagaaagccctctccaggccgggcacagtggctcacacctgtaatcccaacaatttagaagaccatggtgggaggatcacttgagcccaggagttcaagaccagcctgcgcaacatggtgaaactccacctttacaaacaattgtttaaaattagctggatgtagtagcgtgcacctgtagtctcagctactcaggaggctgaggtgggaggattgcctgagaggttgaggctgcagtgagctaggattgcaccactgcacttcagcctgggtgacagagcaagaccctgtttcaaagaacaaaatgcatcttattcttggtacttgtaatttgtaaacacattcatttacacatgcacatacgtctatataattacatattaaatatgtaattatgtattcacgtgtttattgtccatctccaacacccacctctatcccaaatgtcaactccatagaggcagggaccttattagtcttgttcaccagtgtattccttttagctagaataatgcctagcacacagcaagaaaagtaagaaaaatgatgtggggaatcttttaacaaatgattattcattcagagattccccacatcatttttctttcttttttgccctctagttacattggctttgaattcttttttctttttttttgagacttagtctggctctgtcgcccaggctggagtgcagtagcgccatctcggctcactgcaatctccgcatcccgggttcaagcgattctcttgcctcagcctcctgagtagctgggattacaggcgcccgccaccatgcctggctaannnnnnnnnnnnnnnnnnnntttcaccgtgttagccagggatgtcttgatctcctgaccttgtgatccaccagcctcggcctcccaaagtgctgggatcacaggtgtgagccaccgtgtctggcctcagctgaacattttttaagaattcaaagctggccaggtgcggtggctcacacctgtaatcccagcactttggaaggctgaggcgggtggatcacaaggtcaagagattgagacaatcctggccaacacggtgaaaccccgtctctactaaaaatataaaaattagctgggcgtggtggcatgcgcctgtagtcccagctacctgggaggcggaggcaggagatcgcttgaacccaggagacagaggttgcagtgagccgagatcttgccactgcactccaacctggcaacagagcaagactccgtctcagaaaaaaaagttcagctggtgctgtggcttatgtctgtaatcccagcattttgggagggtgaagcaggaggctcacttgagtccaggagttcaagacaagcctgggcaacatagtgagagctccatctctacaaaaaaatacaaaaatagctggacatgatggagaacgcctgtggtcccagctactcaggaggttgaggtaggaggattgcttgagcccaggagtttaaggctccagctgaccatgattgcaccactgccctccagcctggacaacagaatgagaccctgtctcaaaaaaaaaaaagaaagaaaaagttatgtaactttctccctcatttccttagaatatgctatttgctctgcctgataagctccctgccaccacatatttagttaatgactacctgctttctaggtctcagtgtaaatgctactgctttagcgttgctactcctgacattctagacaaggtgaggtcactgttatataatcccctaaaacctatcttttcccttcagaacacttatgatttgtaattatttttatttatttttgtttggctgggttttttgtttgtttgtaattatattttcttgttggtctgtttgctctagaccagagatcagcaaactccagcccatgggccaagtccagcctaccacttgttttataaataaagtttttggaatacagtaaaatgcattcatttatgtattgcccatttggctcctaaaatatttaccgtctgctttttttttttttttgagatggaatttcgctctttttgcccaggctggagtgcagtggtgcagtctcagctcactgcaacctccgcctcctgggttcaagtgattctcatgcctcagcctcctgaatagctgagattacagatatgcaccaccacgcccagctaatgtttgtatttttagtagacatggggctttgctatgttggccaggttggtcttgaactgctgacctcaggtgatctgcckgcctcagcctcccaaagtgctgggattacaggcgtgagccacggtgcccagccaccatctgctctttacagaaaaagtttgctcacctctactctagactagagtataatctctattaggacaaagatgatctcttcctacacactactaaaatttaaagaatttccgtaaaaactagtgaaataaaataaatggtaatcgctctgctaagtactttayatgtattacccacatcaattttatgakaaaaatattattatctacaatctacacrtgaggaaactgaggctcagagccatctggtgagttgccctaaggtcacacagctgataagtagcaaactgatgtttgaatytaagtttaaaacaatgtttcttctttaaattttttttttttttttgagacagagtcttgctcttgtcgcccaggrtggagtgcaggcgtgagccaccacacccggcccttctttaaatttttaaatgtaattaattgatactacaactagtcagtgaaagtttgataaggagcatcttatcataacacaattaattacyactaattaattamaaaagaaaaatagtaatgtgacagtgaaaacagttaatcaaagttaataccaccaataatggggcaagctgacatcattttctcctgctgtactgcaatgagatggtcataatagctcttatatagttttttgccaaaaatgcaaaatctgaatctaatcacaaggaaatatcyaacaaagccaaattgagggacatgttacaaaattcaaaacatcacataatccaaaagacaaaattttaaactgtcaacatcatgaaagacaaagaaaaactaaggaattgttrcagattgagaccaaagagacatgacaactaaatgtactgtgtgaacctagattggatcccagaccagagaatcttctttttctataaagaacattattgggactattgtgaatcggtgttacaagttgtgggtaattaaatatagctacagggagctgggcaaggtggctcacgtctgtaatcccaacactttgggtggccgaggtgggcaggtcacctaaggacaggagtttgagaccagcctggtcaacatggtgaaaccccgtctctactaaaaatacaaaagttagctaggcatggtggcgggctaatcccagcttgggaggctgaggtgggagaatcgcttgaacccaggaggtggaggttgcagtgagctgagatcaygccactgcactccagcctgggcaacagagtaagactctgtcgcataagtaaataaataaagctacagattatttgtatcccctcctgaaaagaggtgaagtctatttacccacctcttgaatcttgggctggtcttgtgactttgaccaataaaatggagaagtgatgacttctgaatttcattttgaaaaggtctyctggcttctgctcttgctcttagaattctgccctgagactattgtataaagaagctcagtatagcgtattaaagatgaggccacrgcctgaagtatacaagttgatagcaccaagtgctacgtatgtaaacaaaagaccatcttagagagatgacaagtcaagtggttccagggragatcagcagaagcaccactcagctgattccagtccaaatttcaacccacagaaatatgaacaataaacagatgccattataggctactaattttagaggtgatttgttttttttgtttttttgtttttttttgttttgttttgtttttgagatggtgtcactctgtcgcccaggctggagtgcagtggcgcgatctcgtctcactgcaacctccatctcctgggttcaagcaattctctgcctcagcctcctgggtagctgagattacaggcatccgccaccaggcccagctaatttttttttatatttttagtagagacagggtttcaccatgttggccaggctggtcttgaactcctgaccctgtgatccacctgccacggcctcccaaagtgttgggattacaggcatgagccactgcacccggctagaggtgatttgttatacaacaaaggctaactgaaacagacatatcttgagatcatttggctacttgggcaagggctcagaggtgaaaatgttaagarttatcaacttatagtctggtccccagttctcaggcgtgaaaattcaaaattgtgaatgaatccagaattgatgagattccatgaataccaggataaccaaagaattcatgataaccaaactcataagaaactatgtaagccaggatatctaccagaaaaatttatagtgaaaattacatatatttttcatgttctctttttggtaactggtaagtatcttttttttttttttttttttttttgagacagagtctcactccatcacccaggctggagtgcagtggcgtgatcttggtggttcactgcaaccttcacctcttgggctcaagccattctcctgcctcagcctcccgaatagctgggattacaggtgcccgccaccacacccagctaattttggtatttttagtagaggcgggttttcaccatgttggccaggctggtctcgaactcctgacctcaagtgatccacccacctcaacctcccaaagtgttgggattacaagtgtgagctgctgtgcctgtccagtaactggtaagtattgacagaatcagtttacttaaaggagagtgaaactggaataacaggagttatatagttttaagagatactttatccaaactgaaataaaccattcttatcccacaatagtatataactatggaacaactagagtatttgtgtccactatagtaaatttctctggactctgaatagtgagagctaatcagtgcaaaatcttgctctctggctgkcctttacttatctcttctgacctttgttttgattgcaaactttctttggacagtataaaaatcagtattttaggattagaacccaatcaatatattgagttcagttacattctagttctttctgcctgatattacactccaattgccttaatggatcttgagtgcttccagatattcttattaaatatttgtcatttttcttttggctttgttaattgtgacttatgccatgcataattttttgcttagtagtcaaatttatcattctaaaacaatctcttctgtgttttgcattatacttggaaggtcaaggaccttagagacatacytctggctattggatgtagactttctttcttttttttttttttttttttttgagtcagtgttttgctctgtcctcaagcctcgagygcagtggtacaatcacagctcactgctgcctccaccttcagggctcaagcaatcctcccacctcagyctcctgagtagctgagactatgcccagctaattttttattttttgtagagatggggtctcactatgtaacccaggcttgtcttaaactcctgggctcaagggatccttttgcctcaacctcccaaagtgctgggattacaggtgtgagccaccacacctggctgcaaataractttcaataaaaaaaactttcattccaggatcatcagtgcaggagtaagctagttgacctggtaacaaaacacatgacctcaataataaacaggaactcctaaagacaataagaggtaagatcttaggaaaaaaaaaaaaagttttcctcattcttgacctgtgaaacaatttcctggcttatattagaaacaatcattttgccagttcttgttttgtttcattttggcagggtctggtgctggtgctctcttctatgtaataaggtgccggatacgtacctacttacaagaaagattatttgtgtcttcaaagcaggtttacttttgttcataaagcaaaataaaatagcatactagtcatctgctacttattttaatttatggttgtttgtgtttacacaagaaagagggccttttgtgaaaagtaaatgatttacatatcagagataattaagataaccctatrcctctgatgagcaacctcacattttaaccatcttgctataaatmtatatagatcaactgaaatttatacaccttagtcacacccaaatttattatctttaacttcaagatcgattatctcctgtcacatcaaagtaaaattgtctgttacagaaatatatatgtgagcatgcaactgcrtaaaaataaggcagcttttagtgtattttgtgcatattgccataaatttgtacagastgacattctaatgatatttcttttattttcagatttataaatatgtgattacatattgtggaaaaataatgctataggctctgtatttcagttattattatatcttattcattctttactgcatttatgccagtaaaattgatctcacaggcctgctttttgcttataatgctaactaatgaaaatccagagcttggcttatcaatgtgagcctttgtaattaacagaagtcttggaaataaataaaggatatgctcctctcccctatagcacagagaggaggatgtctttctgagatataacacatattcaaaatatctgattttgtaaagtgtcaaatggtygatattgacaaaaatatcaatcttttttctcttttgtgcaatatggagagtggtgtgaatcttcggtttcttattrtaagtcwttttctttgaaaaaagagttttataaaactaagacttagaaacttacttgccctggccttgaaaattacctttggaaaaatgcttgtgctttatgggtcctgagaatatactacttttgagatttgtcaggacgcatttggctgagtaacaggttattctcatggctaaaagcctattacagcaaaggatattatacaggatcagcagaaaaaagttatgcctacaagaagacccgaaagattaggtgcagacttctaggttctccctccatgctggtcacagtaaggtgcttttggcacgactacaaattatacgaacatatatgagatgtctctgcccacgtaagtccacttaggtctgaggwcccggagttcttacaggagtctggttgcacaaggcacattcctcccacgtgacaatctatggtgcagatctttacccaggaggcaggtgctcatggcacatcttgatatttgtgttaggcagtgctggcaattgagcatgtcatgcctcagtgcctcaggagcacaaaacaacttcattggtgactatgttaactccaaggacttagccccaagtggttggctaagggttggtaccgtgactccaggtactcctggaaataagctgagtgaactcctttctcatagattataattctgattggtagctttacttgataatttgttgccctgatagtaatgttgtaattgacatttctgcatgtgtaaataggataaattcttgaaagattrctctgcaaatctgatcatttgtttctcatctcttttttttatattttattttattttatttatttattttttttttgagacagatcttgctctgtcacccaggatggagtgcagtggttgttcgctgcaacctccacttcctgagttcaagcgattcttgtgcctcaccttcccaagtagctgggattacaggcacgggccaccatgcccggctaatttttgtgtttttagtaaagatgagaattcaccatattggccagggtgatctcagactccaggcctcaggtgatctgcccaactctccacctcacaaagtactgggattacaggtgtcagccaccacatctggactgttcctcttttcttttgtgtataatggggttgggtggggtggtagggagaaaagtctgactttgctagatttcttattttaacaaagaatctgtgagtcttttctaggtaaaattaacaactagcaaggggttctagcagagtgtaatttcaaaatactctattatgcttgtaaaataaactattcacaatacatagtgtrgtataataataacagatgtttttgtcagcctaaaaataatgagttgaaggttctaacggttgcctttatagaaaataacatctttggccrggcgcggtggctcacgcctgtaatcccagcactttgggaggccgaggcaggcggatagcctaaagtcaggagtttgagaccagcctggccaacatggtgaaaccctgtctctactaaaaatacaaaaattagttgggcgtggtggcaggtgcctgtaatcccagctactggggaagctgaggcaggagaatcgcttgaacccgggaagcggaggttgcagtgagccragatcacaccattgcactctagcctgggcaacaagagcaaaactcygtctcaaaaaaaaagcaagtaacatctttgtccaggcgcggtggctcacgcctgtaaccccagcactttgggaggccgaggtgggcagatcatttgaggtcagaagttygagaccagcctgaccaacatggtgaaaccctgtctctactaaaaatacaaaaaaaattagcctggtgtggtggcacatgcytgtagtcccagctacttcggatgctgaggcaggagaatctcttgaacccgggaggtggaggttgcagtaagtggagatcgtgccactgcatyccaacctgggtgacacagtgagactctgtctcaaataaataaataaataataacatcttcactgagatacaggtatacttcagagataagcccatatatcaggaatatcaggttttgtgatatcaggttttgttctagaccactgchataaagtgaatattgtgataaagcaagtcacacaaattttttggtttcccagtgcatgtaaaagttatgcttacactatactgtaacctactagrtatgcaataacattatgtcataaatgtgcaacataaatacactaattataaaatactttattgctgaaaaaatgctaacaatcatctgagccttaattgagttgtcatcttgtgtcatcagcaaaaagctggtggagagtcttgcctcaacatggatgacttctgactgatctgagtggtggttgctgaaggctggagtggatgtggcaacttcttcaaatcagacaacaaaaaagtttgcygcattgatggactcatttttaaaatattttattttatttcaatagttcttggggaacaggtggttttgcttacatggatactttctttagtggtgatttctgagattttggtgcaactgtcacttgagcattgtacacggtgcccgatctatagtcttttatccytcactcccctcccaccttttcctgagtctccaaagtccaaagtctattgtatcattcttatgcttttgcatcctcatagcttagctcccatttataagtgagaacatacaatatttcgttttccattcctaaattacttcacttagaataatggcctcccrctccatccaagttgctgcaaatgccattatttygttcccttttatggttgagtagtattccatggtgcatatataccacattttctttatccagtcattgattgatgggcacttaggttggttccatatctttgcgattgtgaattgtgctgctgtaaccatgcacatgcaggtgtctttttcatataatgacttcttttcctttgggtagatacccagtagtgggattgctagatggaatggtagttctatttttagttctttaagkaatctctacactgttttctgtagtggtaaatgcgtttgcatttactttacactcccatcagcagtgtagaagtgttcccttttcaccacatccatgccaacatctattagtttttgattttttaattatgggcattcttgcaggagtaagctggtatctcattgtggttttaatttgcatttccctgataattagtgatgttgagcattttttcatatgtttgttggccatttgtatatttcttttgagaattgtctgttcatgtctttttccctcttttggatggtgttatttggttttttcttgctgatttatttgagttacttgtagattctcaatactagtcctttgttggatgcatagtttgtgaataatttctcccactctgtgggttgtctgtttactctgttaattctttcttttgctgtgcagagcttttttgtttaattaggtcccatctaattatttttgtttttgttgcatttgcttttgggttcttggtcatgaactctttgcctaaaccaatgtctacaagagtttttctgatattatcttctagggcatttttatggtttcgggagttagatttaagtctgtgatccatcttaagttgatttttgtgtaagatgagagatgaggatccagtttcattcttctacatgtggcttgccaattatcccagcaccatttgttgaataggatgtccattccccactttatgtttttgtttgctttgtcgaagatcaaatagctgtaagtatttggctttatgtctgggttctctattctgttccactggtcctatgttcctatcttcttcataccagtaccatgctgttttggtaaccacaggcttggagtatagcttgaagttgggtaatgtgatgcctccagatttattccttttatgtagtattgctttggctatgcgggctctttttcggttccatatgaattttagaattttttttctagttctttctttttttgagacggagtctcgctctgttacccaggctggagtgcagtggcgcaatctcggctcactgcaagctccgcctcccgggttcacgccattctcctgcctcagcctcccaagtagctgggactacaggcgcccgccaccacgcccggctaattttttgtatttttagtagaggcggggtttcactgtgttagccaggatggtctcgatctcctgacctcatgatctgcccacctctgcctcccaaagtgctgggattacaggcgtgagccaccgcgcccagctttttttctagttmtgtgaagaatgatgatggtattttgatggaaattgcattgaatctgcagattgcttttggcagtatgttcattttcgcaatattgattctactgatccatgagcatgggatatgtttccatttgtttgtgtcatctattatttctttcagcatgttttgtttatgttatttctttcagcatgttatttctttcagcatattccttgcagaggcctttcacctgctttggtaagtatattcttaagtattttgtggcttttttggttttgttttgttttgttttgcttttgttgttttgttttgttttttccagcaatgttgcaaaagagattgagttcttgatttgattctcagcttggttgctgttggtgtatagcagtgctacggatttgcgtacagtgattttgtattctgaaactttactgaacagggacagtttgacttccactttattgatttggatgccctttgtttctttttcttgtctgattgctctggctaggacttccagtactatgttgaatagaagtaataaaagtgggcatccttgtcttgttccagttctcagagagaatgctttcaacttttccccaatcagtataatgctggctgtggtggactcttcctttcacaaaagatttctctaggatgttatgctgtttgatagcattttactcatagtagaacttctttcaaaattgtaataaatccttttaaaggtgctttatcaactaaatttatggaatattctaaatccttcattatcatttcaacaatatccacagcatcttcaccaggaatatattccctctyaagaaaccactttctttgctcatccataaaaagcaactcttcatccattaaagctttttttagcatgtgattgaagcaattcagtcacatctttaggccccacttataattccagttctcttgctatttccactacatcttcagttacttcttctactgaactcttgaactcttcaaagtcatccatgaagattaaaatcaatttcttccaaactccagttcatgttcatattttgacctacttacatgaatcaaatggcacctaaaatggtgaatcctttccaaaaggttttcaatccactttgcccagattcatcagaggaatcactatctgtagcagccatcgtcttacaaaatgtatctcttagataagaaggcttgaaagtcagaattgccccttaattcatgggctgctaagtggatatgttaggatgcatgaaaacaacattaaccttcttgtacatctccatcagagctcttgggtgaccaggaacattgtccatgagtagtaatattttgaaaggaagstttttttttggagcagtaggtctcaacagtgggattaaaatattcggtcaattggccaggtgtggtggttcatgcctgtaatcccagcacttaggaggctgaggcaggtggattkgttgagctcaggagttcaagaccagcctgggcaacatggcaaaaccctgactctaccaaaaatataaaaaaattagccaggcatggtggtatgcacctgtagtcccagctactcaggtggctgaggtgggaggctcacttgagcccagtaggtagaggttgcagtaagccaagatcagaccactgcactacagcctgaatgacagagggaaaccctgtctcaaaaaataataataataatagtaattcagtaaatcatgctgtaaacagatgtgctgtcattcagacttttttgttacaattatagagcaatagagtagatttagcataattcttttttttttttttttctgagatgtagtgtcactctactgccaaggctggagtgcagtgccacaatctcagctcactgcatcctctgcctcctgggttcaagcagttcccctgcttcagcctccctagtagctaggattatgggtgtgcaccaccacacccggctaatttttatatttttagcagagacagggtctcaccatgttggccaggctggtctcaaactcctgacctcaagtgatctgcctgccacagccttccgaagtgctgagattataggcgtgagccaccgcgactggcccaacttagcataattcttacgagccctaggattttcagaatggtcagtgagcactggctccaacttaaagtcattggttgcattagtccctaacaagagtcagcctgggccaggcacagtggctcacacctgtagatagtgtggagttatgcagacgactttacagataagttactcaacaactaaagagatgagaggagtttcctataaaaacttttaaaaaatcaggccgggcatggtgcctcacgcctgtaatcccagcactttgggaggccgaggtgggtggatcacctgaggtcaggagtttgagaccagcttgaccaacaaggtgaaaccccatctctactaaaaatacaaaagttagccgggcatggtggcaggcacctgtagtcccagctactcgggaggctgggacagaagaattgcttgaacctgggaggtggaggttgcagtgagccaagatcatgccactgcattccagcctgggtgacagaacaagactccatctccaaaacaaacaaacaaacaaaaaacacacaaaaaaacttctggccgggtgcggtggttcatgcctgtaatcccagcactttgggaggccaaggtgggtggatcacctgaggtcaggagtttgaggccagcctggccaacaaagtgaaaccctatctctactaaaaaatacaaaaattagccaggtgtggtggcaggtgcctgtaatcccgctacttgggaggctgaggcaggagaattgcttgaatccgggaggtggaggttgcagtgagccaagatcgcaccattgcactctagcctgggggacgagagcaagacttcatctcaaaaaacaaacaaacaaacaaacaaacaaacaamccaaaaaccttttaaattaaactgtaaaaacggcagcccacttgggctcccctctccactatagatagctttcttctttcatttattaaactttcactccaacctcacgctttgcatccacattccttaatttgcatggtcataagacaaagaactcctggtgatactacacaacaagagactactacattatggtatattgatgagactgtagcagtatttagagagatccaacatatatttcaagtcttttttcatctgaagtcacacaggatgtattttctctctagaaatgaacatatgtgaaatgtctctgctcagggaagcccattcaggtttcagagtctaaggcttttatcagggaccaatcacaaagacatatcctgttatgcgattagccatagcaaccaaaactcaggatcacaacaatgagaccaggggtacatcatcaatctcaatgtttgtgcaaagcaaattagcaagccagyatggcatggtacattgctccaagtgtacacaacaaaatcatcaattagtgacataaagaacatcctaagaacatttccgagggtttgccaagggtcaatcatgattccaggctcccttggaggtgtaaggactgagcaactagacctacttgctatgtagatttatctcagaaatggcctcttaaagagaattctcatcattctagwacctcatttgtcaacaggatttatacactaaaattcaatcttcctaaagaattgagaacaaatttaataaggagtaaactcagattgcaaagataattgtaaagaagttaatggaggaagtcctagccagagcaatcagacaagagaaagaaataaagggtacccaaattggaaaagagggagtcagactgttactattcactcattatatgattgtatacctagaaaaccctaaagactcatccaaaaagctcctagatctgataaatgaattcagtaaagtttcaggctacaaaatccatgtacacaaatcagtaccacagctatacaccaacagcgaccaaactgagaatcaaatcaagaactcaatcccttttacaacagctgcaaaaaatatatacataaaataaaatacttaggaatatacttaaccaaggaggtgaaagacctctgcaaggaaaactacacaacactgctgaaagaaatcataggctgggtgtggtggctcacacctgtaatcctagcactttgggaggccaaggcagatggatcacctgaggtcaggagttcaagtcaagcctggccaacatcacgaaaccccgtctctactaaaaatacaaaaagtagctgggcatggtggcacatgccaataatcccagctactcgggaggctgaggtaggagaattgcttgaacccgggaggtggaggttgcagtgagccaagattgtgccactgcagtccagccagggagacagagtgagactctgtctcaaaaacaaacaaacaaacaaacaaacaaaaaagaatcatagatgacagaaacaaatagaaacacatcccatgctcatggatcagtagaatcaatattgcaaaaatgaacttactgccaaaagcaatctacagattcaatgcaattcccatcaaaatactgccatcattcttcacagaactagaaaaaaagatcctaaaattcatatggaaccaaaaaagagcccacatagccaaagcaatacaacataaaaagaataaacctggaggcatcacattacccaacttcaagctatgtgccaagcctgtggttaccaaaacagcatggtactggtatgaagataggaacataggaccaatggaacagaatagagaacccagacataaagccaaatactaacagccagttgatctttgacaaagcaaacaaaaacataaagtggggaaaggacaccctattcaaccaatggtgctgatataattggcaagccacatgtagaagaatgaaactggatcctcatctctctccttacacaaaaatcaactcaagatggattaaagacttaaatctggctggtgcggtggctcacacctgtaatcccagcactttgggaggccgaggcagggggatagcctgaagtcaggagtttgagaccagcctggccaatatggtgaaaccccgtctctactaaaaatacaaaaattagttgggcgtggtggcaggtgcctgtaatcccagctactggggaagctgaggcaggagaatcgcttgaacccgggaggcagaggttgcagtgagccaagatcacgccactgcactccagcctksggacagagtgagactgtcaaaaacaaaaacaaaaacaaacaaaaaaaaaccacttaaatctaagacctgaaagcacaaaaatgctagaagaggccaggcacagtggctcatgcttgtaatcccagcactttgggaggctgaggcgggtggatcacgaggtcaagatttcaagactagcctggccaagatggtgcaatcctgtctctgctaaaaatacaaaaattagccggtcccagtggcaggtgtttgtaatgccagctactcaggaggctgaggcaggagaatcacttgaactcagggggcagaggttgtagtgagccgagatcgtgccactgcactcaagcctgggcaacagagttagactctgtttcaaaaaaaaaaaaaaagtgctagaagataccatcaggaaaactcttctagacattggtttaggcaaagagttcatgaccaagaacccaaaagcaaatgcaacaaaaacaaaaataaatagatgaagcctaattaaacaaaaaagctctgcacagcaaaagaaagaattaacaaagtaaatagacaacccacagagtgggagaaaatattcacaaactatgcatcccacaaaggactagtattgagaatctacaagtaactcaaataaatcagcaagaaaaaaccaaataaccccatccaaaagagggaaaaagacatgaatagacaattctcaaaagaaatatacaaatggccaacaaacatatgaaaaaatgctcaacatcactaattatcagggaaatgcaaattaaaaccacaataagataccagcttattcctgcaagaatgcccataattaaaaatcaaaaactaatagatgctggcatggatgtggtgaaaagggaacacttctacactgctgacgggagtgtaaagtagtacaaccactatggaaaacagtatggcgattccttaacgaattaaaagtagaactaccattccatctagcaatcccactactgggtatctacccaaaggaaaagaagtcattatatgaaaaagacacctgcatgtgcatggttacagcagcacaattcacaattgcaaagatatggaaccaacctaagtgcccatcaaccaacgactggataaagaaaatgtggtatatatgcaccttggaatactactcaaccataaaaaggaatgaaataayggcatttgcagcaactggatggagtgggaggccctaagtgaagtaacttaggaatggaaaaccaaatattgtgtgttctcacttacaaatgggagctaagctatgaagaagcaaaagtacgagaatgataaaatggacattggactttagggactcaggggaaaaggtgggaggggactgagggatgaaagactacacattgggcacagtgtacactgctcaggtgatagttgcactgatatctcagaaatcaccattaaagaacttatccatgtaaccaaaaaccacctgttcccccaaaagctattgaaataaaagaaaaaaagaagaagtggctgggcatggtggctcatgcctataatcctagcactttgggaggccaaggcaggcagatcacttaaggccaagagtctgagaccagcccagccaacatggggaaacccgtctctactaaaaaaaaaaaaaaaaattagcagggtatggtggcgcatgcctgtaatcccagctagttgggaggctgaggcacgagaatcgcttaatcctgggagscagaggttgcagtgagccaataacktgctgctgcactcttacctgggcaacagagtgagattctgtctcaaaaaaaaaagaagtgaatggcatcaatcgtgaaaggtatcacataaatatgaaaggttacacaactcttttaacctatttgcctagaaaagagtggtaagtagggcttattgagttgttttattttattttactttttattattcatttgtgtattaatttattctttggtgacagagtctcattctgttgccaaggctgcagtgcagtgacatgatctggcctcctaggatcaaacaattcttatgcctyagcttcccaagtagctgggattacaggcgtgtgccaccacgctcggctaattctttttgtatttttaatagagatagggtttcaccatgtcgaccaaactggtctgaaacccctgacgtcaagtgatccgcccatctctgcctcccaaagtgctgggattataggcatcagccaccacgttcagctaatttttacatttttagtagagagggggtttcaccgtgttggtcaggcttgtctcgaattcctggcctcaagtgatccgctggcctcagcctcccgaagtgctgggattacaggcataatttaccgtgctcagccattgtcatttattttgaatttgggagaagatatcacacccatttctatgttctggagcaggaagtctatcttctggagcagcattgcagtctaaatcactccttagttcagctacatccgagttcttatcccaggaccaagaagaataaggaacacagacaccacagagtaagtagagtaggatttattaagcaaaaggaaagctctcagcaaagagaggtgccctgaaagcaagttttcagaaatggggctgagttctgggtcttttatgtggaagaggaaggaaggaagtcttctgtgggttctgcccaaaatgggaggggtaaagttccctcctaagggtgttgcatctgcacatgcctgggattggccagagtgactccatcttggttgttacccacgagtgcctaagtgaaacccaccaaggggctaaaaccacaaaaatgtcatgttaatgacactatgatgakctgggccaaggacacttaggttgatttattccgcctgtgcctaagttaggacagtcccttctgagcaacatcctggcataaggggaagttcttaaccacatttcttcccattagctgcagaggcggtgtaggtackgtcctgctagcgttcttgtgaacactgcccttctccagagaccctccctctctatctgcctaaccagcctctaactgccttctctctcagcaggaagtctatcttctatcttgggatgacttgaaagataacccaataggagcccagaacctaggcatccaagaataagagaaacgaacatgtgtcagatggagaaaacagaaactatggacatcaaaaggctaaattagggccagatatcaaggtcacactggtgcttttaggaaagtgaagtgtaaacagctgagagtagaactacaatgtagatgaggaagcaaaaatgcttagtatagggaaagcgcagaggcagaaaggaaaatagaacccacaagaattgtattttttcttcttccttcttctttcctatttctcaataaatacttacagaatacctataaggcttcattaagtatgtaagcactaagaatatttaatatgtgtcatgaagagtgatcttcaagtaaacatgactcacatgcatctggtgatcttcctaacctgtgtaaaacccttccatttgttgaatttggcaccaaaggctcttaaaggccatttgttgggaatgtgtggataataggctgacttacatctgtaytggaaaaactctatctttgcctttggagaattatggacgtttggttttttacctttagcggatagaagggcagcaagatttgtcatgtgctgtttaaaatctgaatctgggccaagcgcagtcactcacacctgtaatcgcagcactttgggaggccgaggcaggtagatcacctgccaggcctctgtccaggtcaggaatttgagaccagcctggccaacatggtgaaaccctgtctccactaaaaatacaaaacctagccaggcgttgtggtgcacgcttgtaatcctagttactcgggaggctgaggcaggagaatcgcttgaatccaggaggcgaaggttgcagtgagctgagatggcaccactgcactccggcctgggtgatagagtgagacaccatctcaaaaaaaataaataaataaaataaataaaaataaaaactgaatctgggaaaccccagggtcaatttctttactgatggttttaacaagttagatcacctgacttgattatgtggccaaagggacagaaaacccagctggaaacttctgctttaccgctgtgcgtgcgcgcacatgtgtgtgtgtgtgtgtgtgtgtgtgtkttttctcttttccccctacactacacagaagtaagttagcctctcctgaagccaagtttccttgcacttgataggtcaatctggtgatgaagtcgcatcccaccataaygaccctggggaatttgtgtttattgttgttttaagctactatgttattggctaatttattttttttatttttatttatttatttatttatttgagacagagtctctctctgtcaccaagccagagtttagtggtgcaatctcagctcactgcaatatccacctcccgggttcaaacgattctcctgcctcagcctcccaagtagttgggattacaggcgcatgcccagctaatttttgtatttttagcagagatagagttttatcatgttgaccaggatggtcttgatctcctgacctcgtgatctgcccacctcggcctctcaaagtgctgggattacaggtgggagccactgtgcctggctgttctgggctaattttctatgcagcaatagatagatagctaattaatcaaggtatgaatctgggtatctggatgaaataaggctgaatagtacctttattttgtgtttcagagagtttgtacagcccctcacccctgcaccctacacaacataaaagttttgggatgggtgagaagtctgccttattttgtatgctaggagaagggggactggaatactagcagaccatagacacattcccaggtaggtcaattttacggagtgcaaatggaagctgagactcagaaattggtcctttcaagctgttcctgcccatgtacatcatagaaattcttcaagttcccccaagggtacacatcgcaatttgaccaccattggagaggaggtgctatgccattttgggaaatgctttaaacaggaaacagtgcatgtgattaaataaaccctattcagaaaggttccagtagattcagtttctgcttcttaggctacactcaacacggaaagccatcagaaactagggtcaaggctcaggcaggtctccttgggacaatagaacacatcatgcattggccctgcctcctgcctttgaagtttctcttccctgagaggtrgaagacgggtgtcagattgcatggttcgttttagagarcgttattttttctagaataacttcctggtagtgtgtagrttgtgtgacagagaacttctaattgtttctctcttcctcatacacatttaccaaacacagaacatcttgtccttcacacatttcacatggcaattctggatacatttagtcaacataggacatttcaagacatgattctacaatggctatttcaccagtgcataatcacatttttttaatcttcttttttttttttttttttttttgagactgagtctcgctctgttgcccaggctggagtacagtcactccatctctgctcactgcaacctctgcctcccagattcaagtgattctcatgcctcagcctcctgagtagctgggattacaggcatgcaccaccatatccagctaatttttgtatttttagtagagagagggtttcaccatgttggccaggctrgtctccaactcctgacctcaggtgatctgcccacctcagcctccgaaggtgctaatagctgactttttatttattttttgagatggaatctcactctgtcaccagtgcagtggtgcaatcttggctcactrcaacctctgcctcccaggttcaaatgattctcctgcctcagcctcccgagtagctgggactacaggcgcccgccagcacgcccagctaattttttgtacttttagtagagacggggtttcacgatgttggccaggatggtctggatctcttgacctcgtgatccgcctgccttggcctcccaaattgctgggattacaggcgtgagccactgcgcctggccaatagctgactcttaataaaggacgaagatagcactccttctcagctgtctgcagttctttatatwttggttaactctcatggcttcaattaccacctgtgcatctataacaagatgccaaaagtggctgcttctgttgaatcaaaatcaaggactaacgtcaaaagccgaggcaaagaagaaccaagaaagatatgttttaaagagagccacccatcactggagctagattctacccctgggtttactaacgaacagcagaatgagccttattcatggcagctttcaccctatcctcaactcccgtctatagaaaagaggctggggagaagtggagcagacagaggaaatgagagttgcccttggccatgtggtatttctttccttcacaaaactaagtgagggtggccagacgcggtggctcacacctgtaatcccagctctttgagagaccaaggtgggcagatcatttcaggccaggagttcaagaccagcctggccaagatgatgaaaccccgtctctactaaaaatacaaaaaaattagctgggcatagtggcacatacctgtaatctcagctactcgggaggctgaggcagaattgcttgaacccaggagacggagcttgcagtgagtcgagatctcaccactgcagtccatccagcctggactacacagcaagactccgtctcaaaggaaaaaaaaaaaccaaaaaacaaaaaactaagtgagggagaagcctccagtagaaacgctgagagagactgggggtgcctgcaacaagtagacaggcatttcttttttttttttggagacagagtctcactctgttgtccaggctggaatgcagtggcgcgaccttggctcactgcaagctccacctcccgggttcacgccattctcctgcctcagcctcccgagtagctgggactacaggcacccgccaccacgcctggctaatttttttttttttttttgtatttttagtagagacggggtttcactgtgttagccaggatggtctcaatctcctgaccttgtggtccacccgccttggcctcccaaagtgctgggattacaggcgtgagccaccacgcctggctgcatttcttttcttttttttttttttttgagacagagtcttgctctttcacacaggctggagtgcaggtgcagtggcacgatctcggttcacagcaacctgcagcctccgcctcccgcgttcaagtgattcttctgcctctgcctcagcctcctgagtggctgggattacaagcgcccgccaccacgcccagctaattttttgtatttttagtacagacggggtttcatcatgttggccaggctggtctcgaactcctgagctcaagtgatccaccccccacccctcagcctcccaaagtgctgggattacaggcgtgagctgccacgcccggccagacaggcatttcttgcctcaactgaaccttggcttcgagatggcagcacaagagagagggcaaccttggagtagttgctgctgcttgctggttgggtggcagggatacacatgttttcttggaccttagctggccccaagacatagttggtcaggtaagggaactccagcagtaagagtcagaggctaggcagggtgtgggtggggtggaatgggagtcaagaaaatgaaagccagatttcacctcagtgtggtagaggaaataatgaagttgactctatccccgcctcctgaccgccacctcttttggttcctcaagctgtagctctaagcaaggaatgaaggatagtgtcttagtccattcaggctgctataacaaaacatcataaacagggtagcttgtaaacaacagaaatttgttcctcacaattctccagaaaagttgaagatcaaggcaccagcagattctgtctggtgagggcccactccctggtccacgaaccctcatgtggcagaaaaggccagggtctctctgaggcctctttcataagggcacaaatcccatccatgagtgccccaccatcataacctaatcaccttccaaagctctcacctcctaacaccatcaccctggcagttaggatttcaacatacgaattttggagggacgtcaacattcaggtcatagcagatagggaagttttgaattaggtatgtgattgtggttttcagctggactgaactcagttttcacactgaaagtgaggaatctaaatggaaaatcatgatatctgtccagcatgttgttaaagtataggaaaaggggatttagtakaatatggttgaaagcactgatttgaggaaaaataattttttcatatatactccccactgagttgagactcataaaatggttactggttgaggacaccaacgttttctagctacagattctcagtggcctcctgggcatctccattgggataccaggtcaggctctgtacagaagagcagagatagcagtcattggtgtgcgcccaggagccaggctgactgggtgatttctcagctctacacttagctagctctagaacccttggcaggttgtttaacttctttttgcttcggttttttcatttgtgaaattaggataataatagttctttatgatatcattgtaagggataaatgatttaagttgttggagcatagcaaatgatggaccagggatttaaacccagttttatgtgactctagagtctgtgctgtcaatcactggatatacccattgttaaaactgattataggccaggtggagtggctcatgtctgtaatcccagcatgttgggagactgatgcagaaggattgtttgagcccaggagttcaagaccagcctggataacatagtgggacttggtctccacaaaaagaaaagaaaaaaaagttagccaggcatggtggcatgcacctgtagttctagctagctacctgggaggctgaggtgggaggatcacttgagcccaggaggtcaatgctgcagtgagctgtgattgttccactgcactccagcctgggtaacagagcaagaccctgtctcaaaaaataaataaaatagattatatgttaaaagcatattttgtgtgtgtatatacatatatacacatatatataatatgaaaatatattattaaaattatttccaattaattttatgtttctttttccttatttattgtattttattattatttttgagacaaggtcccaatctgtcacccaggatggagtgcagtggcacgatcatggctcactgcagccttgacctcctgggctgaggtgatcctcccaccttagcctcccaagtagctgggactacaggtgcacaccatcacacctggctaattttttttctttcattttctttgcctttgtttgtttgtttgtttgttttgtagaggtcccagtatattgcctaggctcatcttgaagccctggactcaagcgatctttccaccacagcctcccaaagtactgggattagaagcatgagccactgtgcctagccttttcactttttttttttaaagaaaatgtggctattagaaaattcaaaattacaaatgtagttcacattctatttctgctggacagtgcagctttgggctttgtcatcccttgaagtgttctaaaatggtaaacatctcacctccaaattttttttttttttttttagatggagtctcaccctgttgtccaggctggagtgcaatggcatgatctcggctcactgcaacctctgcctccagggttcaaacgattttcctgcctcagcctcccaagtagctgtgattacaggtgcccaccacacccagctaatttttttgtgttttttgtagaggtgggggtttcaccatgttgtccaggctggtctcgaactcctgaccttgtgatctgcccgtctcggcctcccaaagtgtcaggattacaggcatgggccatcgcacccggccaaacttccaaaatctttttttttttttttgagattgcagtggcgcaatctcggctcactgcaagctccgcctcccgggttcacgccattctcctgcctcagcctcccgagtagctgggactacaggcgggcaccataatcatgccactgcactccagcctgggcaacagagtaagaccctgtctaaaaaaaaaaaaagaaaaaagaatgaaagaaagaaagaaagagagagagagagagaaagagaagagaagaaagaaagaaagaaagaaagaaagaaagaaagaaagaaagaaagaaagaaagagaagaaagaaagaaagaaagaaagaaaataaactggccaggctcatgcctgtaatcccagcactttgggaggccaaggtaggaagattacataacactaggagttcaagatcagcctgggcaatatagcaagacccgttctttccacagaggtgaaaaattggccaggcatgatagtgcatgctgtagtcttaactgcttgggaggcggaggcaggaggagtgtttgagcccaggagtttgaggctgctgtgaactatgattgcaccaccaatctggaatgtacactagaatctttatagtgtatatgtattcctcaacaatacatcgagctcctgaccttgtgatctgcctgccttggcctcccaaagtgctggtgctgggattacagtcgtgagccactgcgccccatgtgaacttttaaaaatacattcctgagtcctatctatgaattgccttttgcccatttttctgtgtatttatttttccatttttattgaagttaaataaaatatattatgggtaataatccttccagtgatatgatatgcagatatcttcgttttgttggtcatttcctttggcatcatctttcatttactttatggttatcttttgatagatgctcttcatttattgcagttcaatttctcaatcctttcctttgtcctgtgtttttcacacattgtttaataaatattttccccctctagtgtcttaaaatattttcctattttggcttctaaaagttgttataattttgccttttacatttagggctttaattctctgaaactgtgtttttgttgctgttgtttcagaaccattttcccaggagccatctttttttctcctctgatctgtggtggtgttccaccccagtcatgtttctgtgtatgcataggacttcattcctggttttcctttctgtttcatagacctactttttaaaaaaaccctatagctaatactaaatttttttttttttttttttttttttgagacagagtctcgcagtgtcgcccaggctggagkgcagtggcgcaatctcggctcactgcaacctccgcctccctgcaacctccgcctccctgcaacctccgcctcccaggttcaagcaattcccccgcctcagcctcccgagtagctgggactacaggtgcatgccactacgcccagctaatttttgtatttttagtagagacagggtttcacagtgttggctaggatggtctccatcwcttgacctcgtgatccgcccacctcggcctcccaaagtgctgggattacaggcgtgagccaccagcacccggcctactaaatcttacaaacaagagtgtttgactgtgcttggccctttattcctgtataacactttttattgtttatttaggtggttttataactttgacaatcagtagtttgttctcattcacattgactgtagattttttaaagtggtgacaggtacatgagttaccaaggtagagagcttgtttggtgaatcttcatcctcattacatttctggacaatgcatatggagacggtatgggacactccttattcctttggcccagacagcttccttgagcctgctgtccatccacacatttggagtccccatcaccctatggcaaatttctgaatatcttagacagcttgaggggcatgcttcttggagctcactgcatggatgcaattatgaatattgatggcagtattcttaggtcaccacctgtggatggcaaaatggcccttcttcacctctcctttctttgccagcgccattctgccaggttcaagttgaaaagaaagactgtgagcaattccacaatactttcagaatcagctggagatattgatccttcttatccaaaaataggttatgtctctcaacttatttaggttttctttaatgcagctcaataagattttataattttatccaaagaaggatttatatgcctttcgttaggtttattcctaagcacttgaaatttcttgtaaaatatgtctgttctgtgtgtattttcccccaatattttattattataaactttcaaatgcaaggaaaattttaaaagtacaatggaagccaggagtagtggtacactcttgtaatcccagaattttggggggctgaggtgagaggatgacttgagcccaggagttgaagcttgtaatgagctatgattgtgccactgcactccagcctgggcgatggagcgagaccctgtcttaaaaaaataaataaatgaaataataatacaatgaattagctacatgtccttcacttagactcgatcactgttaatttcatcatatttgtcttaacatctgtctttgtgtacgtaattttgggaggctcattttaacaaactgcaagtggtagagtcatcatttgtaactagaaaatctaattttagggacacaacaagatgttccaggcataccttatattttctttactttttcttttcttttcttttttttttttttttttttgagatggtgtcttgctctgttgcccaggctggagtgcagtggcaccatctcggctcactggaacctccgcctcctgggttgaagcgattcttctgcctcagcctccagagtggctgggattacaggcacatgtcaccatgccgagctaattttttatatttttagtagagacaaggtttcaccattttagccaggatggtctcaatctccttacctcgtgatccacccacctcgacctcccaaagtgttggtattacaggcatgagccactgtgcccagcctgtattttctaactaagcattcacaattgcccatttcttaccctctgctttgtcttaaccaaagccttctctttttcctatgggcccctgaactctgcttgcctccagatctgagcaaaaagaagtagaacttgccctttatcagcttctcctgggagtcggctaatcacatcgagcccactttcctgtcagatctactggtcatttcttcttacttatctagcttccccttaaaagaggctcttatctctgcttcctctcccctaccctaaaaggaaacttttttctgtttgagtttgagatgcttatacatttctgagttcagagtgctctccctatttgatatggttaggctttgtgtccccacccaaatatcatcttgaattgtcatccccgtaatccccatgtgtcaatggagagaccaggtggaggtaattggatcatgggggtggttcccccatgctgttctcatgataatgagtgagttctcacgagatctccctttgctcagcacttctccttcctgcctccctgtgaagagatgtcttctgccatgagtgtaagtttcctgaggcctgcccagccatgcagaagtgtgagtcaattaaacctcttttctttataaattacccagtctagggcagttcttcatagcagtatgagaaccgactaatacactattacaatagtctttctctctagttaaattatttccctaggctggttgcagtggctcacgcctctaatcccaacactttgggaggccaaggcgggtggatcatctgaggccaaggagttcaagatcagcttgggcaatatggtgaaaccccatctctaccaaaaataaaaattagccagtctcataacccagtctcaaaaaaataaataaaactttaaaaataggccgggtgcaatgactcacgcctataatcccagcactttgggaggtaaagcaggtggctcatctgagatcaggagtttgagaccagcctggccaacatggtgaaaccccttctctactgaaaatacaaaaattagccaggcttggtggcacgcacctgtagtcccagttacttgggaggctgaggcagcagcagaatcgcttgaacctaggaggcggaggttatagtgagctgagatcatgccactacactccagcctgggtgacagagcaagactctatctcaaataataataataataataataataataataataatawtaataawaaaataaaataattttaaaaaatgatctccttaagtccagatttatttttattggacatttctgtgccccagacctggaatgggccatttttccaatgaaaagsaaattattcmttttagtgtgtactggtttatttttggtgccagctgcttcctcttgttgttttcttcccccagcaccaatctggcactggagtcatacctccctggaggtttcaaaagccttttttttttttcttgtaagtgtttgccccttgtattctttgaataaaaacattatgtgggcagggaccatgctttattttttaattgaggacgtatattttatgtcttatgtcaccgagtggaaatacagcaaactacctggcctctcagatttctgccttcagttccataaatcctcttaaactaagagagtcacccggtcactttcggatgggacagatacctcagtttattyacatttttcctgacttttcttaattccttcttgtgaagtcagaaactgaaaagtctgagattttctgctacttgcaagctaacaagttaccgtgccacaattttttttttttttttttagacagagtctcrctctgtcgcccaggctggagtgcaatgcagtgatctcggctcactgcaacctccacctcctgggttcaaggaattctcctgcctcagcctccagagaagctgggattacaggcgtctgccaccatgccygactaattttctgtatttttagtagagatgrggtttcaccatgctggccaggctggtctcgaactcttgacctcaggtgatccagccacctcggccttccaaagtgctggaattacagacatgagccaccacgcctggcccacaaatttttatatacatcgtgttagaaaacaggagatctctgagtcagagacaaagacgtgtattcacagtaaaagcagcagccaaggtgacttcagagcttggrttccctgagccccaattcccataaggcaacatagggagggccagatggtacttacaggtgctttcaggtgcaatacaggaggcgaagtctgagtttaggaggctcacattttgcatagggctgcaggaaaatctgcccatcctcccttccagagagaaacattctacactggaatgtgagcaaatatttctggggaaagatgtctgtaaatctctcggtgaaagttaccgttttgatctttatttatctaggaatgtaaatacatttgcttcaggggaagtccttgtctttatytctccagggctgcctgcttgcactaggcattcctagaaagataatcctggcacacaggagcgaaacatgtaggagtgctgaagattcacagacagtcgtctcaatgtctctgaagttttttttcccttaaacttctccttttggacattccccttcattttccttttaaaaatctcatcctttccaacactttcagttgtaagaatttccawatcaagcactcaatatcaaaacaatgtgtgtgacaaacttaaagtgttgaatctgactatgtcagcagaaagcataattatcgatgatgtatgggacagcaatcttgaattaaagaagaaggtgggaaagccccaaatctctcataaattatgatgatgatgatgatgatgatgatkatttagcacacctctgctggcaggaaacaatttattttaaagatgacctgttacattaggtatttgtattgaatgttaccttatgtgttgaaaagggagtgaagagagaatatatatgtaatttcttgtgtatggataacatcgatgtaagtacaaccaaaataccaatgtaagatctgtacaccaacctaataacatgagcatgattgataggttgatcagtagtttggcttattgttcaatgaatatccactcccctctcccttctactgtrggaagattatacttcttgggcctggccctgtgacttgctctggcaaatgtactactaatggaaagacaggagagagaccttgaatatgtttgacttggctcttggtttgacatagctctcctagtcctgccattgttcataagaacaacatgtcccaccagcactgcttcttcagcctgggtcccagaataagactcasgaaacagatatgagcacaacctgaaccccagagcctaggcatctgagtgtcagtctgaggcacaattatcagctgacctgcagatctgccagtaagataaataaattcttggccaggcatggtggctcatgcctgtaatcctagcactttgggaggttgaggcaggtggatcacctgaggtcaggaattcgagaccagcctgacaaacatggaaaaactccatctctgctaaaaatacaaaattagccaggcgggtggtgcatgcctgtaatcccagctactcgggaggctgaggcaggggaatcgcttgaacccaggaggaagaagttgtggtgagctgagatggcaccattgcattccagcctgggcaacaagagtgaaactccatctcaaaataaaagaaaaataaattcttaaattacctgggcatgttggtgcatgctataatcccagctactcgggaggcagaggctgaagtgagctgagatcacgccactgcactccagcctgggcaacagagcaagactcctaaaaaaaaaaaaaaaaaggaattcttgttgtaagccatttggttttggtatgtatgtgttttgttgttgttgttattgttttgttttgtttttttttttgagacggagtcttgctctgtcacccaggctggagtgcagtggcgcaatctcggctcactgcaagctctaactcctgggttcacaccattctcctgcctcagcctccagagtagctgggactacaggcgcccaccaccatgcctggctaatttttgtatttttagtagtgacgggtttcaccatgttagccaggatggtctcgatctcctgacctcatgatccgcctgctttggcctcccaaagtgcgggattacaggcatgagccaccgtgcccggccctaaaaaggggaggcatgaataatccaccccttgtttagcatatcgtcaagaaataaccataaaaatgggcaaccagcagccggctgctctgtctatggagtattcttttattcctttactttcttaataaacttgctttaactttattctatgaatgtgccctgaattctttcttgtgcaagatctaagaacactctcttggggtctggattggaacccctttccagtaacatctttctgacgacccagaggggactatagtgtggaaactcccaactcaaaggctaactttggttaagtgttggggtctgataacatctttctcatgaaccacaartgggacaatactgaaaatacttctcaacccaaaggaaacagactgcagcactaattggccaactttgggtaattggggtacccaagtaaaggatgggattgggttagaggtgcaacttaggggagttagagtctctcctgaaacagagtgggttagagactcatcttaataaaaggcaagaacgcttaaccaaccttgggttagaggcccaaattagaagagttatcccttctaagatttagggagttagaggcctctctcagtaaagtccttctyggctaagaatgggtttgacactattaactgctattctctttcaaataatctgccttgcactctttgctgacagctatgggtgacaggattaggcatgaacaggatcgtgggacatggggagctttttcttccctaaaaggggaaacttgagagctgatgggactgctgaaaaatatcccttcacagctgacaagcggccacctgaacttttgattcagtgttgctggaatgggtgggtctttctctcaactccctgagatcttcaccttccccatcctgccacaggcaaggcttttctctctctcctttccctttcttattttttctattactcagggtaaccatcyttcccagagatcacaagtcaaaactctctggtcagaggttggattaaygatgatggggyccaacagggggcaagtttgagccttgccagtttgatattgggtgctaagcagagtggcaggtcataaactgcttctttgacttttacaaattgttcaatttattttattctattttatttatttatttttgagatggagttccatgctgttgctcaggctggagtgcagtggcacaatcacagctcaatgtaacctctacctcctagattcaagtgattctcctgcctcagcctcccaagtagctgggattacaggcacgtaccaccatgcctggctagtttttgcatttttagtacagacagggtttcaccacattgtccaggctggtttctaactcctgacctcaagtgatccgccccacttggcctcccaaagtgctgggattacagacctgagccaccatgcccagcctcaattcattttaaagcattaaattctagataaggcctggggatatatgggattagccatgccccctagctatacaaagaaggttataaagaaaaagattttatataacaaaggatcttgtatggtaaattcttgttctaaagtaaaatggttgtttgacaagaggtatgtttaggacaagtccraaagtccaagcatgtcataaatggtctgtgtaagtcataaaaatatgaaaataatttatgcaaaaaatgttgtacaatttaaaggtaattaggcttcctaaatgtgtcataaaatgccactataacttgtaactgtaaaactttcctgctttacagctaggtaaggcctgggacacgtaaatgctaaaaaaaaatcagaccttatctgcacttctgtctgctgtcctcggctccatacctaattaaaaccctgaacttaccaaggttttcaccaaaagttaaagtcactaagagttaacagtgtaacatgtatttgtgactactgaagaaacagttttacatgcaaggtgtgtaagaaaagtaaactttgtttttagtaaaaaattataaaaaggcatgggcatgtattttttttgcctaaagggttaaaggattgctttaagtgaaataggaaaattctaaaggtttaaacaagttgtaaacgttttataaaaaaattaattataaaaaaaatctatgtgtgaacagattggctaaagttaaaggggtattattcagttttaaactaaacattggaataaaagcacaacaggtttttcttaaagcaaaaacctgcttttactctgctctttaacaaatattgtaaaggtagttataaaagaggtttataaaaatcttaccttatggtcaaactgattaaatacatttgtctataaggttttattaaaaactgggtttgacagtaatagtacactaatgtaaaagtgacatttggcttattttatataaaaatcatacaagaagcactgtcaaatataaaataatgtttagcttctttgggctatatttgtataaatatgttattggtatgtgttccaaaataattctaatataacttagtgtatattattaataattataattgttacataaaatcattgtatgccacagaggtaaccaaatttctttgtcaattgtgtttttaactgtgactgtcctaagacattttgtcatccacggacacttgttgttttattcctctttaaaaaaatggtttataatcagctataggactctaacaggtgctcttaaattcaggtttctaatacctttgaacactgtaatattaaaatacaggaaaaaactttcggactcayggaaagctgaaatgttcataaatatcaaacaggaattaactgcatggactaaactaatagaagctatttacagcttttaacaattaagtatactcctgtaaacaaaacgtggatcatatttgtttctctctaccagatttctctaaaatatggaaactatttgtaagtattcttaatttatggcaatatagttatttgcataagtgcaataaaaatccattttcttttgtaacaggatgcaattggaaaaactggttattttaccaaggctttaactggaatggtgtgttttcctttaaggaattaaatttaacttatagggccaatacaagtcccttgggagaactggcctcataccttgcctacacagtccctgcacagggtttctgacctgtgataagtaaagaatgtcactttctaacaggcccagaagccccaggttatcttggaacctcaagaggagaggaatttacctagctcataggtatttaagcatacaaaccaatggcagggctcggatctaaaaaaatcttatctaagattccttctatggaacagagttccaatttacaaaaagcttatgtgaaaaataattattcttgctacactttatrcaaacaatcaggccaagtataataaagcaagttggtgttaccataatttgtctttaataaaaatgggaaactggagacagaaaacttaatgtttcaagaactgtggtacacttgttattaaattctagtctcatcagttgctttaaatttttttccctgcaaattaaactgactctgcttattcctgtaaatcaaccagtaatctctaactgctgctcaaaagaaacgagaggatgggtaatgtcaaaatctgaatcaatatctaattctgggcacatactggaatcatctagcaaccccctatcagcttggttctaacacttgcccagttgatagaaagccttctaacttagttaagttgggataattttgcttatgttgttttagtgtggtgaaatatattgctgttgtactctttgtatagcaatgcaaaataagcttactcaatgttttcttaaacacttattaatcttccaaatatcaccttttgttggaactcaaaagttataaatggccctcaacataccaatgctttctttctttctttctttttttgagacaaaaatctcactctgtcacacaggctggagtgcagtggagcgatattaactcactgcaacctctgcctccttggttcaagtgattctcgtgcctcttcctcctgaatagctaggattacagacacccgccaccacgcctggctaatttttgtatttttagtagagtcggggtttcaccacgttggccaggttggtctcaaactcctgacctcaggtgatctgcccacctcggcctcccaaagtgctgggattacaggcgtgagtcactgcrcccaggccaatgctttctaactaagctcctctctaccgtaaacacaaaagaccctaatagttaggcaggaatatcattgcccctattcagcataaagaagttacagaaaatggatctttgtccctctgcagcccttaggattaagggttctcttataaaaggaaggtgggaaatgtcagaggcattggaaccagagcaactccatcttgaaaaggggctgggtgaaataaggctgagacctactgggtggcattcccagacagttaaggcattctgattcataggatgagataggaggtcagcacaaaatacagttcataatgaccttgctgataaaacaagttatagtaaagaagccagctaaaacccaccaaaaccaagatggtaccaagagtgacctctggtcatcctcactgctacactcccaccagtgccatgacaacttacaaatgccatgacaacrtcagaaagttattatatatggtctaaaaatgagaggcatgaataacccaccccttgtttagcatattaagaaayagccataaaaatgggcaaccagcagcccttggggctgctgtctatagagtacccattctttcactcctttactttcttaatacattgttctcactttaatttacagactcgccctgagttctttcttgcacgagatccaagaaccttctcttggagtcaggatcaggacccctttccagtaacaaaagtagattagagattatcagaggttggggagttattgcttaataattagagtttattttgggcatgttgaagtttcagaagtaaatagtggtggtggctgctcaacattgtgaatatcattcattaataccactaagctatacacttaaaaaagccaagatggcaaactttatgttatacatactttaccacaatttgtaaatgaataacgaattagccaaaatatattgaaatgggtgaattgtattgcatgtgaattatatcttgacatagttgttagggacaaaaagggcattcacaatttcaaccttgctgaaaagacagaattctgcagtgctagtaagaagagttaggacacgggataagattgacatgcaattatttagtaagtgtatgcaagcttaaaatccaaaaaataataaaggaaacgcgaagccagtaattgaggacagagccactagtctcctacttttcatgttttgctattcaatacttgctacgagaaagactatttggctaacttcctagaacttgtaacattgtcagtgcccagctaccttaatattccagggagcattgctgacactgttttggcttttgcatgatgagtaattataatgctataagagaggcaagcctgagtcctgggattacccctttacctctatttaggtttatctattccattccagtaatagttactcaccrctaytttaaaaaagaaaagaggytttttgacatcagctgttgctattctatatgttatcttctttctgtaagggaaggtacccttatcwccattctggatctgagcctgaaatctggccaccttttcttcattcatgctgatagtgaacctgaagcaggaggctttttcaacactagcaagtggcaacagcaaaatggcagctctgatgaagacagagaatggaccattggcagttagttttwagaaaatgagtttctagattctcaacttctgtctatgctttttcttaaaagagatcttctatcatgctagctctcagatgttacccagtcctactcttccagctccccatttatrtccaagctcctgctactgatatacacccactatggtgcattgcttatgggaggaggaacctccagggctccaggaaagatacatttctaaatatcagtgctggccagtgaggaagtggatgactctgatgatggagtaatgcatcttttgcaagttagatgtttcccaattctttgctttcaacaaaattgaaagagagctgagaaagttgacataccaaatttcattaaaaatcaacttttgataatcagtaactatgtgggttttggcatatacttcagaaagagttcaaataattgaatgaaatcactataataaaaccccttctattccattctacctatttatgctacaaggagtccaataaaaacaaatccatacttagataaagaaaggcctttttcaaaaagacttatgtaatgggggtggcagggggaaagctattgtgaaagaatactccactggagcaaacaaggttagaaggaacagagtatgggggaaatggaatcagagagtggcacattggacaatttttctttgcartcagccaattctggaagggtcattaaggaggttgttccacattccaatgcttgtttaaactcaacagtaggccaaagttcaggggcctcaggggaaaagagaagcctaactagagtttggtcaggtcagattagcaggtattttgtccagactggtcagtgcaaacagttcatctaatcatttatgagataaaataatgggaatttggagagcctgtgttgtctttgtcttaggtaaacaagggggtcgtcatccattggtcttatctaaatcatatagggaagggtggatttttgcagtaagccattttcaggaccgcaraagagtggagggatttttaaactattgctattttccaggagtatgatgctcaggtaaagttcaacattgccaacctttttgtttgtttgtttgtttgtttgtttttgagatggagtttcgctctgtcgcccaggctggagtgcaatggtgcratctcagctcacagcaacctccgcctcccaggttcaagtgattctcctgcctcaggctcccgagcagataggattacaggtgtctgccaccacgcccagctaattttctgtatttttagtagagatggagtttcactatgttggccaggctggtctcgaactcctgacctcaggtgattcacctgcctcggcctcccaaagtgctaggattacaggcgtgagccaccacgcctggtcccattgccaaaggtttacatggatttgatgctgaaccctgtgcattttattaaaaagtcatgagcatccatacgacatccatttcactaaaataagtatttccagtaatgttttacttccatattggagcacccactaactcagctattagtgttaagttcaggaatgacagaaggactcattagatacaatttgtttccataatatagatgcttattccatgcaaactgcttcattatgmagaatccacaattacatttttggcatcctgatcattttatctaaggatccaagatcacaaggatttcttaagcagttgctgttatttttcaacaaaattactcaacttctttatactataatgcttgtcctctgtaacgccttgcatgcccctattgggatctgggctagtttgattaaggagggatctcagtgggatggcagtgtgatttaactatgttgtccctccctttccctcacaggtactagggaagctatgaagatcagattttgctaggcttagagctcttggctttcctttcccttctctttgtcaatgctttcatttccaaaaaagccataagaaacgaacatgggatagtatttctagcttttccctgcactgcttgcttctcttttttcaacccatttaatcagttcttagtgaattagatcaatgtttttttaaatttcactgataagagcaattcttggatggagtcatatcaaacaacatgatggttaagcaatctttcaggcatcaaaattatttgttccctattcatcttcttacaacataagggttttttgcctctacggggtcagaggtcttcgtatcaattgccactttatttttaatttaatttttctttttcatcactcccaaagcaccggaatcaatcgccacttttgatacaaacctggattgatggaaagactaacaaaacaacgcagtttcttttttcttttctgagatggagtttcactcttgttgcccaggctggagcgcaatggtacaaactcggctcactgcaacctccacctcccgggttcaagcaattttcctgcctcagtctcccaagtagctaggattacaggygcccgccaccatgcctggcttgtatttttagtagagacagggttttgccatgttgcccaggctggtctcgatctcctgacctcaggtgatccaccagcctcaacctcccaaagtgctgggattacaggcatgagccactgcgcccagatcaaaacgacacagtttcaataccagtttacttattttattcaaaggatgcaggacaggtagttcagcatccaagcaagcactgctttgagcaaaaggccttgcaatatcccaggcacagyttccaagcttatcatttcatgggtcatgctcagttacaagggatgaaggtaaagcaagatggaccaccttggcactgsgaagctcttctactatctgctctttgactttttataacttattagtcatatcattcctcagggtgtgtataacttaataaataactttttttttttttgagacagagtctcactctgttgcccaggatggagtgcaatggcccgatctyggctcactgcaagctccacctcccgagttcaagcaattctcctgcctcagcctcctgagtagctgggattacaagttcatgccaccatgcccagctaatttttgtatttctagtagagacggggtttcaccatgttggccaggatggtctcaaactcatgacctcatgatctgcctgcctcggcctcccaagttgctgggattacaggcgtgagccatcacgcccggccataaataacattctttgggagcagctgtagcacctcaatgaaaggttatacaacaaatagccccaacaaccagatacacttcaggtggaaaaagcatggtccacacaacattctacacttaccrtaacttagtacattttgagaactaattttgcaagaaagtaaattcagggtcagcttcccaggtgtccctggacctggaccaagagtttcaattctctgagaattgtttctcttacaatgcttaacaattattttttaaaagtgtatttactttttgtgattgtttgtttattactaataactgtagtgatcatttaatccagaagaaacattgaccacttagaactttaagatcggctgggtgcggtggctcacgcctgtaatcccagcactttgggaggccgaggcgggcggatcacgaggtcaggagatcgagaccatcctggcgaacactgtgaaaccccgtctctactaaaaatacaaaaagttagctgggcatggtggcgggtgcctgtagtcccagctacttgggaggctgaggcaggagaatggcgtgaacccaggaagcggagcttgcagtgagtggagatcacaccactgcactccagcctgggcaagagagcgagactctgcctcaaaaaaaaaaaaaaaaagaactttaagatgacaggaaataaaaacaatttaaaataatttcaattcttagacacatttttgctcagagaaatatgataagatgattaataaaagacttttgaacacatattaaaatcaaattttgtgaggaaaaggaatgaaaaatttttcaaagataaaataaattatataaaatgtctgtctattgaagaagagtgttattttctctcttgtatgatgaatgatggaatataccaaaaccctatgctaattagatttggtagatacactttaagaagtaatataacgtctgtttttatttatttrtttatttagacagagtcttaccctggtgcccaggctggagtgcaatggcacaatctcggctcactgcaacctccgccttctgggttcaagcgattctcctgcctcagcctcccgaatagctgggactacaggcacacgccaccacgcctggctaattttttgtatttttagtagarcyggggtttcaccatattggccaggctggtcttcaactcctgacctcatgatccagtcacctcagcttcccaaagtgctgggattataggcgtgagccaccacacccggccagaaaaagtaatataacttctatttttaaaagtcaatatttacattatgcctcaaattatgttctttgaaacaagttagaagtaggtgaggaagaacatatctttttgaaattattttaggtgtactgagaaaaagttaagtttaacagagagaagggatgactaaattatgttaaactatgtgactatccgagggttcttttagtactctcttaatctagccatagcccttagatctatcctcacmgtaagaaacacatgtttttctccaattactttaggggckactactgtatgtcaaagatcatgtcacttgattttatttatcttttcrttgcaacactattcacaacttgtcacttttkaaaaaacacaaggtcagttaggtagatcacatgactattcttagtttttcatactctgtatccaaattttacctttatactctttgccrtgtgactttgcagttctccccactagggaagggatgtatttcctgtgagttactttgactaatgaaatatgagttgaggccgggcatggtggctcacgcctataatcccaacactttgggaggccaaggcgggtggatcacctgaagtcaggagtttgtgaccagcctggccaacaatggtgtgaccccatctctactaaaaatacaaaaaattagccgggcatggtggcggacgcctgtaatcccagctacttgggcagctgagacaggagaatcacttgaacctgggaggcaaaggttgcagtgagccgagatcacaccactgcactccagcctgggcaataaagagcaaaactccgtctcaaaaaacaaacaaacaaacaaacaaacaaataataaaaaaaagaaaagaactatgagttgaaggaayggtgtgacagttcttgcttcaagagacaataatttccgatatgttcctgcgattatttatttatgtatgtatttatttattcttttttgagatggagtctcgctctgtcacccaggctgaagtgcagtggcaccatctcagctcactgcaacctccaactcctgggttcaagcgattctcctgcctcagcctcctgagtagctgggattaacaggtgcgtgccaccacgcagggctaatttttgtatttttagtagagatggggtttcaccatgttggtcaggctggtctcaaactcctgacctcgtgatccgcccgccttggcctcccaaaatgctgtgattacagccatgagccactgcacacagttgttcctgtgatttttttaacgaagatttaggagtttttcctttgagtgagaaaactggcgatatttgaataatggctgaagaatagtattgtatgaatgttaatttcccggttatgatcgctgtactgtgattgtgtaagatgttaacaccagggaatgctgcgtaaaagatatacaggaactctgtactattttggaaacactgtagtaagtctaaaattatttcaagacaaaaagtttacaggacatgccccagttagctgctggtccaaagaactgaggaaacatgttgagcagtcctgaacccaagtagaagcctrgagccacactcaggcaccctatagcctaaagcaaggttgctccagcccatgcaaagatccatgaacttgttgttgtaagtctgagacataggaggtgtgttatgaagcattattgtggtaataactgactgttttagtccattctcacactgctgtaaagaactgcctgagacttggtagtttaaaggaaaggggtttaattgaytcacagttccgcagggctggggaaacctcaggaaacttataatcatggtggaaggggaagcaaaaccttcgttcttcacatggcagcagcgaggagaagtgctgagcaaaagcggggaaagccccttataaaatcatcagatctcatgagaacgcactattatgggaacagcacgggggaaaccgccctcatgattcaattacctcccacagggtccctcccatgacacgtggggattatgggaactacaatacaagatgaaatttgggtggggacacagccaaaccatatcactgatgaatataatggagttgaaatatcttgtctttaatttgtatgtgcacatatgtgcatgtatgtctgtatgcccatgtattttaatccagcacctctttattcatgcattagagtgacagtcagaggtcctcaataattgatgagttttcctttgagaatgaaataagagagatttgataacttgattaattcatagacaccaccttaactaagtgatcagagttaatatcaccagtaatgagatatatcaacataatataatcccttacataatgcaccaagaagggggcaacatacctgctgtggaattcttgccaaaaatgcataacctcaatctaattgtaagaaaatatcagacaaactaaattcagctactctctgtaaaataactaatcagcagtcctcaaaagtattaaggtcatgaaagacaaagaaagactgaggaactgtcacagattggaatagactaagaagacatgatggcttagagaaatgtaagatcctggattagaccttggaccaatgaaagaacattagtgggaaaactggcaatatttgaataacggctgaagaacagtatttagcaatgttaatttcccggttttgatcattgtactaggttgcgtaagtgttaacactagaggaagctgggtaaaagatactacaggaacgctactattttggaaactttgaggtaagtctgaaattatttcaaaatgaaaagttttaaaaaacatcaggaatgaggccatttatctttagagtaatacattttaaggaatctttagggtttccatttaggataatatttgccagacctcatgaaattaaatcaaaatctctgaggtgggagtgaggcatcggtattatttttaagccctttaggcgatcccaattgcagccaagtttaataacaagtagtatagacaataaccatcaaatgaacaccagtgtacccaccacctagtttaagaaatacccagttttgtttgtttgctgrgatgtcaaggcaagaaatatctagttttaagaaatacgctgtagactcttccctgatcctgcctgcaaatttctccaaccatagttttcctcattctgtaatcaagtttaatttaatttaatcatagtttaatcaaatacacatgtatccttaaaacatatagttttaaacatatacttttatttttacacgtttaacttaatatgaatgaaaccaacattataaatatatttttggcagctagctcttttcttactcaacattatgtcaatgaaatgtatagattttaattcatgtagatgtagtttattttcattgctttcagtattttattattttgttatatcaggatttgtttgtccattctaattgagaacataagggctgtttctagttttttgttatgatacataatatagctttgaacattcttgtttgcctcattgcgcccacatgtaagagtttctcctgagcacatgcccagtaaatggaatttctgagtcatagggcacatccatttcaggtgttctagataatgccaaattggtttccaaaatcaatacaccaatttggagtcctatcagccgtgtgtaaggttgcttattgctccacatccttgccatcttttgattgtgtcaaacttaactcctttttttttttttttttgcaatatggtgggtataaaattatctcattatggtttgaatttgcctttccctgttaagtagtgagactgtgcttctgttcgtgtttctgtgggttgtatactcatgaaatgtatgtatgtgtttttcttccatttttctcacgggttgtttggtatttctttwtttttttcttttttttttttgagacagaatctcgatgcattgcccaggctggagtgcaggggtgatctcggctcactgcaacctccacctcctgggctccagtgattctcgtgccttagactcctgagtagctgggattacaggcacataccaccacacctggctaatttttgtatttttttagtagagacagggtttcaccatcttggccaggctggtctcccactcctgacctcaaatgatctgcccacctcagcctcccaaagtgctgggattacaggtgtgagccactgtgcccggctgagttgtttggtatttcttacttatttgtagaagttagttatgtttttctcagttataattctttgtcaattatgtgccaaatatcttctcccagtttgtagcttatattttcattttcattgtggtatcttttgaaaaccagaagttcttaattttaatataatacaatttatcaatctttccctttatatgattttcttctttttcctgttttaaatgatggactattagaacgtggaactatattattttaaatattatgataaatacatagaatacataatacaaaaaagttaaacaactggtatatatattggataagaaaagataaaatgatatctttcagctgattataagatttatgcrgccgggcactgtggttcatgcctgtaatctcagcactttgggaggccgaggcggacggatcatgaggtcaggagttcgagaccatcctggctaacacggtgaaacccccatctctactaaaaatacaaaaaattagctgggcttggtggtgggcacctgtagtaccagcaactcgggaggctgaggcaggagaatggcatgaacctgggaggtggagcttgcagtgagccgagatcgtgccactgcactccagtgtgggtgacagagtgagactccgtctcaaaaaaaaaaaaaaaaaaaaaaaaaaagatttatgcctgtatatcccaaggactccggtttgaagaaaaaaaaaaactacttgaatcaataaaagtagtgatatggtagttgtattcaagataaaaatacaggccagatgcagtagctcatgcctataatcccaacacttttagaggccaaggtgggagaggattgcttgagtgcagaagttcaagacctgcctgggaaccatgccgagacctggtctctacaaaaaataaaaaattagctgggtgtgtggtgatgcatgcccctagtcccagctactcaggrggctgaggtgagaggatcccttgagcccagaaggtcaaggatgcagtgagccatgatcatgccactctaccccagcctgggcaagagagtgagatcctgtctaaaaaaatttaaaaaaagataaatatgcaaaaggtataaaaaccagtatgttttttcaattcttgaagtagtggcacatgcctgtaatcccagctacttgggaggctgaggcaggagaattacttgaaccctggaggcagaggttgcagtgagccgagatcgcgccactgcactccaggctgggtgacagggcaagactctgtcttaaaaaaaaaaaaaaaaaaaaaaaattggccgggcgcagtggctcatgcctgtaatcccagcactttgggaggctgaggcaggcggaacacgaggtcaggagatcgagaccatcctggctaacatggtgaagccccgtctctactaaaaatacaaaaaaatacaaaaaattacaaaaaattagccgggcgtggtgacgggcacctgtagacccagctgctcgggaggctgaggcaggagaatggcgtgaacccaggaggcagagcttgcagtgagccgagatcacgccactgcactccagcgtgggcgacagagcgagactccgtctcaaaaacaaaaaatcaaacctgcaataaacttatgcatatatatgtttayattgttggaagtttatcttcagggtaaatttctagaaatgagattgctgggtcaaaatataagtgcatatgtcgtttattcagatattaccaaatttctctccagaagcgttgaaccmattttcattcccaccagtaatgaatgagactgtgtatttcccttacagtctctccaacagaatatactgtcagtctgtatttttaaatttttgtctatctaaacttttccaggtaaaaatggtatctcagtgttgttttaatctgcatttttctaattatgaatgagtctgacattttttcatatatttgagagacatttttctatctttttttgtttgttgtctgttcacatcttttcccatttttctgttgagtttttggtcctttgtcctcaaattttaagcattttttatattttaaggattttactccttgtctatggtatatgtgtgaatattttctcctatttttgtcagttatcctttgtccttctttatggtacttttgtcacgcaaatttaagcatttacatatcatcacatttatcaatcttttattacgtctgaattttgagccccagttcaaaagccattccctacactgaagttaaagaggaatctacccgtgtgtttttctaatatgttggtgcaaaagtgattgaggttttgccattacttttatttatttatgtgtttgtttgtttgtttatttttgagatagagtctcgctctgttgcccaggctagagtgcagtggcacgactggctcactgcaacctccacctcctaggttcaagtgattctcttgcctcagcctcccgagtagctgggattacaggtgcgtgccaccatgctcagctaatttttttttttttttttgtatttttagtagagatggggtttcaccatgttggctaggctagtcttgaactcctgacctcaggtgatccgaccacttcggtctcccagagtgctgggattacaggcatgagccactgtgcccagccctgctgttacttttaatggtgcttgaatggtttccttttttacatatagatccctcatctattagaagttgattcttacatatggtgtgaagtattcatctatatatattttccaagtgcctacccatttgttctagcattttttcaaagtctttctttacttcagtgatttgacatgccatctttgccagatacctaattgtatcttgataaataaaagttacttttaatggctaagtactttaaaatattatcttaagttacttttagaatttataaayatttctccctctttttaacccctttaaggtaaagagtcccaaagcagctttagggagggaaaaaggtcacagtgggaccttggcctggccttaactgtcaagacactaagctgatgagtggcagctgtaaagagttgtcctggggactgtgccaggatactttttatattatttttatctctatgaaagcaatacatgtgcatagttttatatgtcaaaaagtgactgggcatggtggcatgtgcctgtaatcccagctactcgggaggctgaggtgggaggattgcttgagcccaggaggttgagaacrgcctcagcaacatagcaagaccctcatttcaaaaaaaaaaaaaaaaaaaagaaataaaataaaataaatgtaaaaatgaaaaaacaaaaagtgaagtgtgaacaataagaagtgtaaatcctggccgggcatggtggctcacacctgtaatcccagcactttgggaggccgaggtaggtggatcacgaggtcaggagttcaagatcagcttggccaagatggtgaaaccccgcctcttctaaaaatacaaaaaattagccgggtggggtggtgggcgcctgtaatcccagctactcgggaggctgaggcaaaggattgcttgaactcgggaggcagaggttgcagtgagctgagatcgcgccactgcactccagcctgtgcgacagagcaagactctgcctcaaaaaaaaaaaaaagaaatgtaagtccttggctgtacccctcccctaaccttgatttccaactagagtttaagccttaagaggggagattagaactaataaataattttagcaaggctgcaagatatgagatcaatacacaaaaatcaatcgtgtttctacacacttgcaatgaacagttcaaaaataaaattaataaaagtttcatctacaatagtatcaataagaatacattatttaggaataactttaacaaaagaaatgcaaaaattatactccccaaactgcaaaccattcttgaaagaaactaaaaaacatccaaataaatggaaaaacattctatgttcatggattgggagataatattgttaagatagcaatactyggccaggcacagtggtgcatgtctgtaatcccagcactttgagaggctgagctaggatgatcacttgagcccaggagttcaagaccagccgaggcaacataggaagaccccatctytacaaaaaatttaagaattagcccagccaggcacaggggctcatgcctgtaatcccagcactttaggaggccgaggtgagtggatcacctgaggtcaggagttcgagaccagcttggccaacatggtgaaaccccatctctactaaaaatacaaaaattagcctggcatggtggcatatgcatgtagtctcagctactcaggaggctaaggcacaagaatcacttgaacccaggaggcagaggttgtagtgagctgagatcacgccactgcactccagcctgggcaagagagcaacactccctctcaaaaaacataaattaaataaatttaaaaaaaattagttgagtgtggtggtgcacgcctatggtctcagctactcaagaggctgaggttggaggatcgcttcagtgcaggaagtcaaggctgccaaggctggtgtgagctgtgatcacaccactgcattccagcctgggtgacagactgagatcctgtctcaaaaacaaaacaaacaaaagcaatactcctcaaattgatctatagatttacagatttgaagatttgatcagaattccagctagttatagaaattgacaaaatgatctaaaattcatatggaattgcaagggacctagaatactcaaaacaatcaagaagaacaaagttggaggactcgcactttgcaatgtaaaaacttaataagggctggaagcagtggcttataccagtaatcccagcactttaggagtccgagtgggcagatcgcctgaggtcaggagtttgagaccagcctggctaacatggtgaaaccccatctctactaaaaatacaaaaattagctgggcattgtcgtgggcacctgtaatcccagctactcrgcagtagaattgcttgaacccgggaggcagaggttgcagtgagctgagatcatgccactgcactccagcctgggtgacacagcgagactccgtctcaaaaaaacaaaaacaaaaaacttattgaaaagctgtagtactcaaacctgtgtggctgtagtctaagaattgtcatgtagatcaattgaatggaattgagggtccagaagtaaacccacatgtttatggtcaacatttttaagaagagtgccagratcttcaaatgaggaaagatctcctgattggctacaagtagacctgcccttatttgggtataaacccatggaaagtccctagttagaagttaattgacagtttctggttggttaagtctctagttttgttttactttttacattgggcctcagtttgcttacataggaacccaaaaagctgagactatctcagcctaatggcctcccagttaaaatgttttgttttgttttgttttgttttgttttgagaaagagtctccctctgtcacccaggctggagtgcagtggcgcaatctcggttcactgcaacctccacctcccgagttcaagcaattctcctgcctcagcctcctgagtagctgggattacaggtgcatgccaccatgtgtggytaatttttgtatttttagtagagatgggktttcgccttgttggccaggctggtctcaaactcctgatttcaggtgatccgcccaccttggcctctcaaagtgctgagattacaggcatgagccaccacgctccrcccccagttaaaatgtttttaacgggcagtattaatatcattccatttcacagctgaagaaactgccttaggctatgtaacttaagatcaaacagctgtaaagggtgaatctgggatgcaaacccagccactgactacagagctctgctcatcttttagactatatggcactcaactcacgtcaacttttaaatgtggtttctttcttttagagcaaattttgcaatgaatacattcttgtaaaagcacttaactttacataagtgtttaaaggaaaacacatagatatatccccaaccttcttttttyttttttytttttttttgtggcagggtcttactttgtcacccaggctagagtgcagtggtgtgatcatggctcactgtagtcttgacctccgggtgcaagtgatcctcctgccttagcctcccgagtagctgggaggtgcatgccaccatgcgtggctaatattttttgtaaagaaggggttttgccatgttgcccaggctggtctcgaactcatgaactaaaagcaatccactcacctcagactcctaatagtgctaggattgcctrcatgagccactgctcccrgccgcaccccccacctttgtacagggcaaagactttgttatgtattcttccagacttttacattttagggagaaatttgtgcttccatcgaaaactgcattttataaattgcatccttcctggttatctgattctatgagagttactttataactctataggtttgttagcaatgcaaagtaattaatactatattgataacaagatacaagaattaatgtaaaataattcttatctatatatatgacaatggtctgttagggggaggccaacccacctgccccaccccaagccagtttgcacaatcatttctacatttstttactccacataaatttcttcttctttgacgcctttgaacaggttataacatctgcctacttttctcatttaattaatacgttaagtaaaatctttagcatttgagaagatacaactataaatatagctatgattcagtaattatgggtttcttacatcactgcccattagtcccctccagccaccagaccagactgattatttatggttttgcttgctttgcttttgttttctaggtggckatctcttaggaaccccagtagtttggacacacacacacacacacacacacacacacacaggcaaggtcacagtcagatccctggcacgttaatttggccatttgcccaggagcagctggtagcaatccttgtgttccagcacttaaatttctcctctcaggttaggatctctgagaatataggaaagaaaaaaaaaaaggagtttctcctagtctctcactaacaatcaacgtagaagactcctgtgacctctgatcaccaaaatgtgtaggggtttcttctcaccagcaactaatcaatcaatcctgaccagttgggtgtcttctaaatcagctcagttctgacactatccacctggagatagcatcagattccacaggttgaggactcaattcccgagactgccctgttttccattcagatgccarttgcaagctccaggttgttttacctgtgcttctgactgaccaagctatacatcgggtttcccaaaaacccctccttgggtttgatkgatttgctacagcagctcacagaactcagaaaaacacttaactaacctttactggtttattataaaggatattacgaagaataatgatgaacaccagatgaagagatgcatagggcatggggtgagggaaggggcatggagcttccaggccctctctgaatacaccaccctccaagaatctccatgtgttcagtcatccgaaaaacctctgaacactgatttttggggtttttatggagtctttgttacataagcatgattgaytaaaccattggctactggtgatcaacttaaccttcagcccctgtcccctcccaggaggttgaggagtagggctaaaagttcgaaccagcaaatcctaccttagtctttcaggtgaccagcccccatcctgaagcctagaggctgccagccgtaagtcaatttattagcatacaaaaagacatttctcactttgcagatttcacagattgtaggagttcttatgccaggaaacaggacaaaggccaaatatatatttcataatatcacagtctctaatttcattgttcagcttctccttcccataagactgtcaagcctctccagaacacagactgtgcagtattgaccattccttctactgtcccatttcttagccctgtcttagatactcctatctctgggagaattttgcttgcataccagtatgtctgttgaagagagctcttaatgctaggtcttttattttatttattatttttttttgagagggagtcttgatctgtcgcccaggctggagtccagtggcgcaatgtcagctcacttcaagytccgcctcccgggttcttgccattctcctgcctcagcctcctgagtagctgggactacaggtgcccgccaccacacctggctaattttttgtatttttagtagagacggggtttcaccgtgttagccaggatggtctcgatctcctgacctcgtgatccgcccgcctcggcctcccaaagtgctgggattacaggtgtgagccactgcgcctggcctattttatttttatttatttatttttttgagacggagtctcgctctgttgcccaggctggagggcagtggcgygatctcggctcactgcaagctctgccttctgggttcacgccattctcttgcctcagcctcccaagtaactgggactacaggcacccaccaccacaccccgctaatttttttgtgtgtttttagtagagacggggtttcactgtgttggccaggaaggtctcgatctcctgacctcgtgatctgcccgcctccgcctcccaaagtgctgggattacaggcgtragccaccgcgcytggccattttttttttttttttttttgagacaaagtctcattgtgttgcccaggctggagtgcagtggtgygatctcggctcactgcaacctcctcctcccgggatcaagtggttctgcctcagcctcccgagtaactggaattataggcatgcactaccacacccagataacttttgtatttttagtagagacagggtttcaccatgttggccaggctggtctcaaacttctgacctcaagtratcctcccgcctcggcctcccaaagtgctgggattacaggtgtgagccaccaggcccgaccaatgctaggtctttgcagtgggtctcatatcattccacgtacactgaggcrcacttgttgccagagaccaaaaactttactgagcaccctttcacccccagcgcccmcttggctgggtctatttccaattcttttagtctctggggctgatgaaatgaagatgggagggtagggcaagagaaacaagaagagctagccaagaagatagaaaataaygattttcagctcactgccacctccacttcccgggttcccgcgatcctcccaccacagtgaagtggtgtcatttgcctgggaaaatacccaaggttcattgtctcataccaaggaaatcgaagacacggacacacaagagatgagtaagagcagaggcttaataggcaaaagaaagagaaaagagaatagctccctctcctgcagagagaggggtgcccgagtrggtcttccagttccatggtgaggtgcacgggttttatagactggcttgaggaggcagtgtctgatttacatagggcccaaagattggttagaccaggtgtgacgtttacatagctcacgaagaagctggccaccccaccttaatcttttattatgcaaatgggttttctacctggccagagccatgttgcctgttccttactggacatgtggttgacaaagaaaagggaagatggagctgccaygttgaacatgcctagcccccaggtaaccttttcctattgtcacagctgccggcattcacccatgcaaggttccagcttgcttatctatgtctgcagctcaattttacaggctgactttttcaaaaagaaatgacttggggactgcttttcattaaaaggaaaaccttactgaggactttcttaccctyactatctgcctaaatcatttctttttaactcctatatcaatagcctcccaagtagctgggactatacgtgtgcgccacgacactcagctaatayttgtattttttgtagagacagggcttcaccatgttgcacaggctggtcttggaactcctgagctcaaagtgatctgcctgccttggcctttgaaagtggtgggattacaggcatgagacaccatgcctggccttcaaaaagttaatctaaaaatatatawacatatatcccagaaggagaagcagaagggtcagataggtgagaaccagggctttgaatatcagaaaaaccaggaagagataatatgtcaagtatggagtgatcaatactctcaaatgccgtaagaggatttgtgagcaattgagaaagccatgggatttgttcattagaatgccactgtgaggctcaactgatgaatctcagtagggtggtgaatgtaaaggctagactatgggaggttatggggctgggaggttgagagaaggaaaaycatattttatactgttcctgagacatttaatgaaggaaaaaaaggaaacaaaaaagcaacttaaaggttaagtcccacaaatgaattcttcaagtgaactgaagagtagcaaaacatgccactccaaacatgccactttggcatattgattattttgagataaagacagtgaaaggaagggaaatgggatacttccctgattcccyttgcaggacrtgcaacagaagtgtagctcacctgttcagttgcctcactgcttaatccccttgtgagacagagagcatgcagacaggcaggtgcagaggctggggtgagcgctctggggtctggcccggcygtagtgtctaggagtggatgcctgcagccccagcgttacaaagctttcagcttggccgcccgaagacagcttgaatgttaaccagcttaatggamcytttgccttttcacaagggcagagggccaacatgatagcttgctgtatcccgagctcttgttcagcgtcctggaaaaatcaggtcacacacggactcaaaggatgaatgcgaggttttattgagtggtggaggtggctttcagagggatggatggagagccagayggtgggtggatggaatgggaaggtgatcttcccctggagtcaggccgcccagcggctggactcctttcctaccgcccccagctgaactcctcttggcatccagacgtctctcctcttctctctttccctgctgtgctgttccaccgtccatctgctggtmtcctcctctactcacctgctgctctgctgtggagcttggggtttgcggtttayrtgggggcaggatagagrgtgtggagggacaaaaggcaacctctttgtcttgaaaacaggaatgcctgtcctcatttagggccgcaggtcttcaggcttgaaggtgaggtctttgccagggatccaccctcttctaaccagtattttccctgtcccctgtccgtatcagaagcagatgcagatacaagaaaacttctctgcctgccctccatatttgcctaaaagcaggacataatttttgtttgtttgtttgttttttgacacagggtctcgcactgtcaccaggctggagtgcagtggtgtaaacatggctccctgcagcctcaacctcctgagctcaagcaatcctcccacctctgcctcccaaagtgctaggattacaggcatgagccatcacgccagccaggacacaaatttttttttttgagacagagtctcgctctgtcgcccaggctggaatgcaggggcgcaatctcggctcactgcaagctccacctcccaggttcacgccattctcctgcctcagcctcccacgtagctgagactacaggcgcccgccaccatgtccagctaattttgttttttgtatttttagtagagagggagtttcactgtgttaaccaggatggtctcgatctcccgacctcgtgatccacccgcctcggcctcccaaagtgctgggattacaggcgtgagccaccacgcctggttcaccaggacaaaaatttttaaaggtgtctgcccttccctttctaccaggaaggaccaaagttaatcactggagacaactgtagattcttatcagcccagagatgacaccagaggaatctacatttcaaacttcattaactagctcttaccatctattagttcccccatttaaacatatttactttcccacaatttatcaccctagaaacttaaagtcgttttcctttgtattatcatttctctacaaatgttctttcttatgaagctagaaaaaactgaggcatggtttaaacgtcaaataatttatctgagccaaatgtgagtgactgcagtctgaaaacacttccaggttaccttgagaagtgctccagaaatcaaaaaagagactcgggccttaaaagaaaaaaaggatgaatcaggaaaggggcgactagaaaagttgtttttcgctaggtctggggctttggggaggtgggtttcccatttgcaaaatggaactttaaaagtccacggcacctaacatttccaagctcctctaaatcttccaggaagcacaggagatgcagggcagatgggagcattctcatcctgcagataaacaggcctggggtcagctgggaggttggaaaggcaggcactagaataccaggtactgggtgagtgaaagcacagtgtgacctggcaagggaaggggaggcgagagcaaagcagttgctgtctctccarwttctccttcactaaccacctcagcccagggcctggaaagaaaaagaacttaaggacttccacaggctgagactggatgctgraggtggacagtggctcacacaccttcttgaagtcaagtggctcctcccctgcccaccagatgccaagasggtctgttggacccagacctgtggtgacagctacaagagaaggaggagacaccaaagttgagtttgctttataagtgacattgcaggctgggctgcagtgggggggcaggatgaagattcaggctgtacttttcaagggaccaagggcttgggatccacataggcctcccacaccgtcagatgtcagctccatcaatactgaaagacaatrggagatgaggtagggagggggtgagaacgtggggagagggaagggaggtggtgggaaagagaggaaggaagaggtgaggaaaggcaaggaggaaagggaagggaaaaaaaagttgtttttcaactattatgatcagtgtgatcgtatctaaagcagtcttggagtcaggagacaggctgtaattgtttaaaaggtggcctgttcctggggacttcccagctcagcaggaagcagtcacagatgttttggcagttgtttagccaggaagttctctgcttaagacatgcgtggggtggctgggcgccgtgactcatgcctgtaatcctggcactttgggaggcagaggtagggggattgcttgagcccaggagttctaaaccagcctgggcaacgtagtaggaccttgtctctataaataaataattaatttaawtttttttttaaaaagacaggcctgaggtccaaaccgaaatggcctcccgactccattttatgtgctttgactaacccgtcactgtttcccttcatcattttgttaagwtgctggacaagccccagttctagccaccctttttagttactcatcactgaatgctcccatgtgtatacaggcagcacatgttaaaaaactttttcggccaggcgcggtggctcacgcctgtaatccagcactttgggaggccaaggcgtgcggatcacgaggtcaggagatcgagaccatcctggctaacaaggtgaaaccccgtctctactaaaaatacgaaaaaaattagctgggcgtggtggcsrgcgcctgtagtcccagctacttgggaggctgaggcaggagaatggtgtgaacccagaaggcagagcttgcagtgagctgagatggggccactgcactgcactccagcctgggtgacagagcaagactccgtctcaaaaataaataaataaataaataaaaataaactttttcttggccgggcacggtggctcacgcctgtaatgccaacactttgggaggccgaggcgggcggatcacctgaggttgggagttcgagaccagcctgaccaacatggagaaaccccatctctactaaaaatacaaaattagctggtcatggtgacgcatgcctgtagtcccagctactcgggaggctgaggcaggagaatcacttgaacctgagaggcggaggttgcggtgagctgagatggcaccattgcactccagcctggacaacaagagcgaaactccgtctcaaaaaataataataatacaaataaaaaaataaaaaataaataaaataaaataaaracgtttttatcttgttaatctgtcttttgtcaatctaatttacagggcccagcctgtaaatctaaratgagtagaaggaaaaagaatttttcccctcctgggcagaacactcttgggcacgtgagccttggcttcttaaccacatatctgagcagccagtgtggcagtggtgagtggcagtggagagactccaggaagcagccatttccctatcctgggtgcttcctgtttctgtctaatgctacacatagtccatggtttcagtatgttgtatgtgtttgattgtcaatccctrtaattacatcctacctaaaatatgcatttttgttcccrgaaccaagccgggtccggctgcattttcttgaggcccaataacgagaagcagacagactaggaaagaagggaatttattgctgtaaccagatacaggcagaaggctggagataattccaccaggccaactyaaagtgtyaacaattgtcttagtgtttatataggttgggrttatgcgcctgtgtgcagtgtagcattygcctaagtctactggtaactaattttgtttcaactagaaggtcagaggcaaaaatgctttctaagtcggattaagctgtgagcggcccagtacctacaaggyctgtctrctgtggtaccagagtgattatttctatcttatctgcttyacagcttggtctggagggctgccttagactctccaatgaatctattcgaacagctgcctctgttaccttgactgtctcagatttcgttgacccgagacgggtcctggcactaggaatgaaagactgtctctattattttggtttgctccaggttagggagaagcccacrcaaggctcctactgaccatatgtttcatttctagctttgctgtctgggcaccaatttccctaggtttaactatttgctcaatgttaaggcagctctggggaaattcgtctgtgtaactggggtgctatgcaggcctgtctgtttgactgtcatgcaggtctgtctgtgtgatcatcagggagaatyggccggccacattttcaatctttctcctcttctggaraaaataaccactcagtctttagcgtcagctcacccttcagggtttgacacctggagcagcagtcaaagaagctgaaaacasgaccttcctttctaggtgttaactttagccactgtggtagatggtccagaaagatgaccactgctaattcctttcctccctgaatgtgcatactgttgcagccatcagaggcggagtcggtttccttcccttgaattccgtctggttttgcgacttcccttgactaataaacagaatgaggtggaagttaaagggaatcayaacccaccctatggtacaatgattcttttaagacattcaagttatagatgcagaaagaagcctcttctgagcttcccttatctgactataggcagggccttkggagaatgaagctgccataaatcccctctctgggggagcttccagccaggaaggagcctgactgttagcacctgggtgagaaattgcataaacaaacattatcataaactgtaatacctgccattggtttccctaaaagcccatttktacttcccacagaagctctagctttcccgctccttctgcctattaaattgttgttgtaatatacccttacccctagctgttcagcaagctactgctttctaatgctgtcacatgtatgaatataaagcatgttytttttccctctagttaaactgtctaatgtcargaaatttgcaggcccacttcctccccccaccaccacttgaacctaatttagtgatggaaaggttttattcccartatagttgtgttttatgttcctgttctaggcttaaattttcaggggcctggaagcttccatttttgtttcaggaagctagatgctatgctttgaagaagctcagccaagacaactggaagagaagagactacatggagagagaaaggccaygtggaggaccactggggctccacgcattgagtgaagcctttttggacttttgagccagccaactaataagaagtaaaaccaacactgtggagtggcaaacaaaagaaaatgcattttaatctgggtctcaggaattgcaattgggagacacagatccagcaaataggaaaatcatgttccgtcttggtgagattaggcagaggcttagaaggactactgtgagtttacacatctggaaggttttagcatagttcataatggatgatggctggttaacaatttagtacgtctttgatgatcaatctagttcagcatagctgtctcttgtcggtaaaaaaaaaaaaaaaaaaaagccaatctctgcaaaatatttaaagagctttattctgagcccatatgagtgaccatggcccagggaacagtctaaaagaggtcctgagaaagtgtgcctgaggtggttgaattacagcttggttttatacattgtagggagacagaagttataggcaaagacaaatcaatacatctaaggtatacattggtttggccaggaaaggcgggacagcttaaggaaggagcaatacaggtcataggtggattcaaagattttctgatttggaattggtcaaaagagttaagctgaagacttaaagtcaggctgggcgtggtggctcacgcctataatcccagcactttgggaggccgaggcgggcggatcacaaggtcaggagatcgagaccatcctggctaacatggtgaaacccgtctctactaaaaatacaaaaaaaaaaaattagccaggcgtggtggtgggcacctgtagtcccagctactcgggaggctgaggcaggagaatggcgtgaacccaggaggcagagcttgcagtgaaccaagattgcaccactgcactccagcctgggtgacagagcgacactccatctcaaaaaaaaaaaaaaaaaaaaaaaagacaaagtcagtagaaagaaatgcttgggttgagataagggggggtgggctgtgattcttgttatatagatgaagcctcagatagcaggcttcagagagaatagatggtaaacgtctcttttggaatttcacaggtgtcagactcttagttaatctctgctagatctgggaaaagcctagctgcattaataaagatcctctacagatgcaaaatttctttctcaaaagatggcttctcaggaccatttcaaaatatgccaaagaaatatattttgaggtaaaatattttaattttcttcaaggtctgttatctgtcatgtgatattataccagttggaatttggtatcttcttaccaaagagtctgtttttgtcagtcttatgatctctattttaatattaatgctggtctgttatacctaaactttaaaagggagagagtataatgaggtacgtccaacccttccttcccatcatggcctggaatttagtttttcagcttgctctggggtcccctcggcctagacagctgtctgttcagttggttgggggcttaggatataatttttggtttacactcttcaggttgatgatcaggcaaagcataaacagttcaaatcaaatgcagctggttttacaatttggcccagttacagtcagatttcatctgagggtccaactcttcatgccttctcaactcaactgttagatacctccaacaaaaccatcaaccatctccattgtggattttcttgtcagaaccccagcccatcgtctcactgaagccatcctagtgagtgaccatggctgtcaccacatgaactaaaagaaccatcaagccaagccctgtctagtgtccagacctacagaaacaggagcagtttggagtggtttattatctagcaatagataactgaagtagctacaaagataactttagcatgatttccaggcaaagtgctctctcctcagaatttgtaagattcctccaaagagcagctgtagagctgttaagtatccaatccaaacagatgggagaaaagataaagctcttgacaagctgctgtggaaaataccaattcatgttatctctgccttcctgggaacttgcaaatgaaccagccctcaaatgcagctctggatatgacaaaccatcccagatggacccctaaaggtccccaatagctttgtatctttcaaaaccacataaatcttagaatctacagtttaggttttgtttgtttgtttgtttgtcttagacagagttttgctcttgttgcccaggctggagtgcaatgacgtgatctcggctcactgcaagctctgcctcctgggttcaagtgattctcctgcctcaacgttccaagtagctgggattacaggcacgtgccaccaggcccagctaattttttgtatttttagtagagacagggtttcaccatgtttgccaggctggtctcaaactcctgacctcaggtgatccatctgccttggcctcccaaaatgctgggattacaggtgtgagccactgctcttggcccagtttagggtttatagtgtgccaaactacgagatccctcccagttctgcttatcttaatgtaaaaggacattaaatataaataatataaattatataattaatgacaattaaaattatttttaagttaattgtttttgtttttgtttgagactgagtctcactctatcgcccaggctggagtgcagtggcacgatctcggctcactgtaacctctgcctcctgggttcaagcaattctcctgcctcagcctcccgagtagctgggattacaagcgagtgccaccatgcctggctaatttttatatttttagtagaggccgggtttcaccgtgttggccaggctggtcttgaacccctgaccttaggtgatccacccacctcggcctcccaaagttctgggattacaggcatgcaccaccgtgcccggcctgctaattggttttttaactaaagaaataatttatggagaaccaaacataaaaaggtataagacaaaaagaaaaagtcaaatggtgtcaaagaatggtgtcccagactcccaagcaggaatccttgcagaaattttccatgtttatacaataaccaccataaacattgaacatttactatgtgtcaagtactctcctaaacactttatatgcattaattcagcagaaagcaaattttttatgttaaagttacatagcaaatattttaggctttgtagagcacttggtctccgttgcaactaatcaacactttgttgtagtaagaaagcagctatagggagtatgtaaactaacggatgcagctatgttccaataaaactttatttataaaaacaagctatagcgccaggcgcagtggctcacgccagtaatcctagcactttgggaggccaaggcaggcagatcacgaggtcaggagatcgagaccatcctggccaacatggtgaaatcccatctctactaaaaatacaaaaattaactgggcatggtggtgcgtgcctgaagtcccagctacttgggaggctgagacaggaaaatcacttgaacccaggaggcggaggttacagtgagctgacattgggccactgcactccagcctggtgacagagcgagaccccatctcaaaaaaaagcaaacaagcaacagccagatttggcctatggctattagtttgctaactcctgaattatactcatgtaatagtcaaaaaaaccttatgaggattattatcataacaccattttacagataaggaaccagggatagatacaaaaacagagaactcaagtaaattgcccaacaagttatcaagtagtgaaactgagatgtaatcccaggctgtctagctccagagtgttttttagacactattttttaaagcacacatgtatgcatgtatgtctttaaaatttttatttatttattttttgagatagggtctcactctgttgccccagctggagtacagtggcatgaacacagcacactgcaacctcgacctcccagactcaagcgatcctcctctctcagcctcctaagtagctaagaccacaaacatgcaccactatgccttgctaattttttaaattttgtagagccaggtcttgccatgttgcccaggctggtcttgaactcctggtgagagctgaagccagctggacttcctgggttgggtggggacttggagaacttttctgtctagctaggggattgtaaacgcaccaatcagcgctctgtgtctagctaaaggattgtaaatgcaccaatcagcactctgtaaaaacataccaatcagtactctgtgtctagctaaaggattgtaaatgcaccaatcagcactctgtaaaaatgtaccaatcagcgctctgtgtctagctaaaggattgtaaacgcaccaatcagcactcggtaaaatggaccaatcagtgctctgtaaaatggaccaatcagcaggatgtgggtggggccaaataagggaataaaagctggccacccccccagccagcagtggcaacccactcaggtcaccttccatgctgtggaagcttttttcttttgctctttacaataaatcttgctgctgctgactctttgggtctgcaccacctttaagagctgtaacgccatgaaggtcggcagcttcattcttgaagtcagcaagaccatgaactcactggaaggtagaaactctggacatatctgaaggaacaaactcctgacacaccatctttaagagctgtaacactcaccacgaaggtctgcagcttcattcttgaagtcagtgagaccaagaacccaccagaaggaaccaattctggacatgctggcatcaagtcatctgctcaccttggcctcccaaagtgctgggattagagatgtgagccactgcgcccggctgtgctgttttgttttgtttgttgttgttttttaatttgagatggagtctcgctctgtcacccaggccgtagtacagtggcgcaatctcagctccctgcaacctctgcctcctgggttgaagcgattctcctgcctcggcctcccgagtagctgggactacaggctcatgccaccatgcccagctaattttttgtatttttagtagagacagggtttcaccatgttagcccggatggtctcaaatctcctcacctccttacctcaagatctgcccacctcagcctcccaaagtgctgggattacaggcgtgagccaccacgcccggcctatgtgtatttttttttttttaactcatactgtacatgctgtttggcatcttgcttttctcacttaacaatatcttgcctatctttccacgtatataaatctacctcgttcctttaatttgctgtatagtattccattgtatgaatcaccaatcaataaatacctagattgtttctgtgcattttcccttaaaagcaatgcttcactgagtatccttgtgctgaggtatttgcctgcagacgctcacacagctaagaatgaaggaaaaattattataaataaaatggttggaccaggtgaggtggctcacacctataatccccacactttgggaagctgaaacgggaggatcacttgtggctagaagttcgaggccagcctaggcagcaaagtgagacctcatctgtacaaaaaataaaattaggccgggcgcagtggctcacgcctgcaatcccagcattttgggaggccgaggtgggcggatcatgagatcaggagatcgagaccgtcctggctaacacagtgaaaccccatctctactaaaaacaatacacaaaaattagccgggcgtggtggcgggcgcctgtagtcccagctacttgggaggctgaggcaggagaatggtgtgaacctgggaggcggagcttgcagtaagccgagatcacgccactgcactccagtctgggtgacagagcgagactccgtctcacaaaaaaaaaacaaaaaaaaaaaccaaaatacaaaattagccgagtgtggtggcacaggcctgtaatcccaactactcaggaggctgaggcaggagaatcgtttgaacccagtaggtggtggt

SEQ ID NO: 6913 - DNA, 13524 bp, Homo sapiens
aagatgacaaattgcaagggaaaggagcatgtaaaaatatagtagatcatctacctgatctttcttcttccctggccacaagaggaagcaactactgagacttctgatgtcagaagcctttgtaggaaaaagggaaaaggaaggtctagataactaattggtggtatttgtgggaaggagtggggaatgagaaggtacttgaactctcttctctctttaagaacagtcagttacaggctacactgagcagcttaaaatgactctggtacaatcacacaggtctgaaactcccaaacaagaagcacggacagaacatacagagctcagaaaggggtgttacttatatcctgactacagtggaatggaataagtagatgactcacaacagctggagcaggatcaagcctaggagtaacttaatcagccacaccatcaacaatggaatggatagaatgaataagatctagtattgatagcacagcagggtgactacagtcaacaacaatttattgcacattttaaaataacgaaaagagtgtaagtggattgtaacaaaaagaaaggataactgcttgaagtgatggataccccatttaccctgatgtgagtattacacactgtatgcctgtatcaaaatatctaatgtaacccataaatagacacacctagtatgtacctacaaaaattaaaaacaaatgaaatggaaagaaaatgtttccaaatgcagatatttttctaatttcctctttgttctacttaaagagtatttcaccactatgaaaagatggaccagaaattatagaggcaaggatgagaaggccccaaagctccctcccctgcaccagggtaaccattctgcaaagttccctcttctgcctccaaggaatccatcagcagagttctctcctctgcctcagagaaccaaccaacctatagtggaaccttttccttccccaggatgcagcttatgaagctggttcccctgcttcccaggggaaaagctaaaagcatcaagagatactgaataaaatccacagaaaccttgcagtgaattacttacccttccgggagccactgaggcagagaggggtcaccatcatctggaatctttaaaaagagataggaaacaagttagatcctgggaaagatgggagattgcctgtaatctgagcagcgagcagtagagtacaagcccagagcagtgtaagtcacattcaccatgtggtgacagcctgtctgacatctaaaccaatgtcctgatcagtcagggcaacaagcaggctgctgaaatgagtggtacctgtctccttggtgaataggagatagggcaaagctcactgagtttgcagggctgaagtctactggaatggcagaactcatatcactcttatatgagccattagtgtagacagcagtaaaccaagcacaggagaagggcctacttaggcttccaggcctcactaaagcaaaaggacaccttcatatagagtccagtcttcttccagctatattcctaaactcccttaatgtcccagagtcagacctggtctctctggattcctatctcattttgtggttggatttagtttgggtgccttgaacctctgactcactgacactaagtatattctctctatttaataaattctacataacaagagaacccagggtagattagacacttggattatcattctagtgaattctataggccctagaatgagaagtcgaaacttgagacaccaaataattcaaggaagggaacagttcaaaaatcaccttttaaaggtttctgtaccaaaagaaaacaaaataaacaaaagcaaatccttcaagcagcatgcagaaaggtccaaagctgccagagtgctccagaggtccaatagcacatgcttttttcaggctaacaggtctggggcttcctgcccctccttgttttcttccactcccaacaacttccctgcctcctaactatcctggagcaaatgagctccagaagggaggcagaattaaggtgcttagctttgaacagtgagtgatgttttggagagctaaagtggggagaagttatggataacaatgaggcaatacagaggagaatagggacagataggacagagctaatggtgatggaaaagtgagggagaattacctgggtcagcaataggctcacatgaattttggatttaagactcctcttaggttgtctatgttttaatcaagcctatctccctacggaccagagcccccattccaccccatctgcctcctatcctttctataggtaggatgatattggtaatgggagggccaggtccaaaaggcagccagaagtggctgaagcaaaagacaatggggatagtatagaagaaacaacagtaggtgggaagaaacaacagtaggtgggaaataacagaaaagctgcaagtcttctaaggttgcttatggaaggggtaagggttgagtgttggggagccaatccctaaatccccagatcttaccaaccagaacttattttccctctggaaatagccaccgtactcagcaggttcttatttcctatccagagtgagatatttgccagaaaccactgggcttaaggaaacaaagtcacaaaaagtctgagaacctggctcagatcatgcacatttcctgtgctcagaagggataacaacatgtctgcaaaagcctgcacacatagtacacacaacttgtgtctgaaggaaacacatggtgagcatggatcctaggcttatggcttcagaacataagcttcagagtattcagtgatctgcagaaactcatctgaggaggattcacagtgtttactatggcccaaatcacaggcaaagcaaaccctcatggtcttcaagagccagtgcttgcaagcacagggcattagtatactatgcattcacatggtttggggaaaccacgtaacagggctacagaagcctgtgctcaacagagaggtcaggaagcctgttcagagcacaagtaccttcacacttagggcctcaggcaagaggcaggaaatgcctgcagcaaagcctgctctcaaatacaaagtacacatgcgtgctgggctcagccaaggttttacagcatatgccagagtttgcagcaacaggtagaaaatggacacacactgagctgagtaggagaaaaggagggtaatcagtgtctgggggagtcaaactgagtataagcacacacatgctacattgaatgcacacccatgctggtgcacacacattctcgcagtgtgctccagggatatctgcaggagcacacacaagcaaggagcatgcacacaaactgcttttcagaaaaatagactgcatgagccaaagctcagaggcacagatcatgcacgcacatgtgcatgtacacacacacacacacatacacacacacatacagtgcttgggaaggaggggagggaaatagacaaaaaaggacgacccaaagggtcataggcacaacctgaagggctcctcgcttttcttctgcaaggagagaaagagcagaaaaaagggcagaaaggttagtagagtcagtcctataagtagggaacccaaagaaaatgccagctaaactccaagggacatggaagagagggagaggtcctcgggacaactaggcagttcatagagcccagctgactggcttccagaatccttcctgcctgtatttgctggcccaggatttttagtttggaacatccctggagatgttccaaactaaatcaagggacaaaatctacccaggggttccagtcatccttttcccatttccaaagtggcctgcatcaagggtcagggctgccaaggttgcaagaccagatttgttaccaatgaccactccaacagactatctaagctggctgagcacagagtgatttccttcctcagaagccacgtgagcttattctagatctggtataagtcctcaaactccaaaggccctggtgactgagccttttccattttgcaatgcaggcttggccatgcattcactcaatgagctctggcccgtttctcggacctgaaattaagttggaccagggtagggcctggagttaagtccaggaccaggatgctgaatggctacaggcctgggggcatcgactggctgctttcctaatagaaatcacagtgatctagatgataaaaccatgactgcaatcccaaatctgattatttatcaaacccaggacaatactctaaaggaaactgacacttccagaagggcccgatcaagccataacaggataaaaataaagcccagagattactcctttcctattcatcagagactacattgccttctaggccatacatggataggcccacaggcttccttctgtaaggaaagtccacccaccttggtccattagtgcccctccattttcttttctcttttaaaggcccattgatgtcacatcacaagtagaggggagaattcaagaatcgaattcacaggttcccaatttttcaagctatttctgcttacttaatgggtcacctgtcctggactaggtgacaaggaatcctccaaaacagtgcagctccaggaaggtgggaaagatgagaaagacactccctggaatggggacatatctcttccatatctacatctcaacccccccaggataatgtgttccttttgagtaagaaaattaggcaaacaatcctttaactgaccccatgactcaaactggaaatgtacctctcccccttcactatcttaaatatattctacaaccatgtcaaagttgattgtgtccttctgttctccacaggtttccccataatgcctaaagattaaaatcaaatcaatccattgacagagccgtcacggctctccatgatctggcccaaatccccaaattcctctcctctgccctctttcttgaccccatatacattcctacaatctaattgtcttgtttcacaaagacgtcacatactcaaaaccccaaatttttatttactcattctgttccattagcctgaaatagcatctcacacctcctttccatagaggaaaatccaactcttcctccaaggcatagttctgggaagccttctctgatgcccacccaagcaagagttaataaggccatcctagtgcacctaagttacattcatccttctcattggtatttaacacataatgccttgacaagtcccaccattgtacagatgagaaccagagcaaatagatgcagattttttttttttttttttttgagacagagtctcgctctattgcccaggctagagtgcagtggtgcgatctcggctcactgcaagctccacctcctgggttcacaccattctcctgcctcagcctcccaagtagctgggactacaggcgcccaccaccatgcccagctaattttttgtatttacagggtttcactgtgttagccaggatggtcttgatctcctgaccttgtgatccgcccacctcggcctcccaaagtgctgggattacaggcgtgagccaccacgccccgccctagatgcagatttttaacttcaactgggccctctgtgtcacttgataagtctcttcttccattagtcagctccctcttccacttctcaaaggagttatacctaaccttcagatacctactttatcacaacacattaaccactgcttagtgtgtatcacctagatatcgcatgcttagttcaaattcaacatatccaaacactaaacttctatcttccatctctaaacgtctcctcctgtccccagccagacaatggatctctccctctctgcactctgtccctatccaatcactcagccctgtactttttacctcctaaatatctctggcatccactgctgcctttccatttcacactgccactatcatctcttaactggactataacaggagactccaagctgatctctctgccactagacttgctcctctccaatccatactccacatttcccatttcgaaattctgatcgcatttttttctttgcttaattgcatcaattctccccgttgcttactgtagcacataaagtgcttcaagatttgtacttcccctaccgttctagcttactttccttccgctcctcacgtgtcctgtattcaagtcttactgaacattctccatcacatctgagacttttcacacctccctcccacacccagcctactgggtggactcaggcatattccctaagacttagttcaaatactaatgactctgtgaaatttctgtctgctttccttcccaaggtaggattaagtgcctctccactagctgccctggtctccaccattctatgtccacacttctaagacagtatgttgttaatactgttttgtagtatcatatattgtagttgtctgtataaacatcttcctttataatatttctcactttatactacttcttcagaaaaaaggattatatattatttcacctttgtagcctgagggcttagcacatcgcctatcatttctatgtagtaaaagaaaactataactttcaggacttagaaaacaacagctattctaagaagtgtctcttgcccaaccagagaaggtataagtctcttaaccagtagtctgtaccattttccagaccctgaggaactgctatactggctattcagtttgtcctacccgttggacaaacattaaaaaacaactttttttcttaagaatcaaactttctgtgcttcccaactccctaaaatgccttaggatttttccacttagatttagtttgcaggttaagttataaatgtctacaaaacaactgctttgcaggaaaatccytgaccccctaagaatgatctctctcactsttccagacagtccattttataaggaagtgacatacctcctcatcagcactcccctcagtatacccaataatacaatcttaactccattattgagagtcaaaagacttgagacgttcaacttatttgagcctacatttccttaactataaaaagayaggtatatgaacaactacctcccagggttattgcaaggattcatttcttaagaacctattatactaagggctggtcatggtggctcatgcctataatcccaacactttgggagactaaggcaggaggaaggatagcttgaggtcaggagctcaagaccagcctgggtaacaaagtgagacccccatctctacaaaacatgaaaaaaatagctgggtgtggtggcatatgcctgtagtggtggcatgtgcctgcacgtgcagtgcagctacttgagactggggtgggaggatccattgagaccaggagatcaaggctgcagtgagctctgatcactccactgcactccagcctgggtgacagactgagactctgtctttcaaaaaaaatttttaactaaaaaaattttaaaagaacctaatgtgcacactaggcactgttctcaatcagtgctggtgatgtggcagtgaatgacacaaactccctgatcctgaaaagcttttattttagtaagaggagcagataataaacaatgatgaagatgatgacagtagctgatactaatcaaacacttattttgtatctggcattttatttgggtaagctcatttatttctcacaactccacactgggtaaataccattattacctccacttctttgataattaaattgaagatcagagaggttaagcaagatgccagcaagtggcaaagccaaaattcctaacagacattcttgttccagggtctgctttccataagaaataacaatatactatgtcacatgtgataggaacttggctgaaaaattcagataagggaaaaagataatgccccctgatgatggaggtagagttgttattaaaaatccaaaaaatggttgttagggcggcctcactgataggtgatatcaaagcagacttgaaagaaatgagtaaagaagccatttggagttctgggaaaaagtattttcggaagaacatatagcaaatgcaaagcctgaggtgagagcataattggtgtggagaaacagcaaatttgcaataaagtaccagttcaaatagggctctacaggcctttataagaatgctggtgtccattctgagtgagacaggaaatcattgagcagagaggtgatataacctgactcatgctctatggggattactctgattgttgtgaggagaacagactgtagagggacaaggttctagaagcagggagagcagtgagaccactgcagtaatctagatgagagaaaatggtggcttaaacaaggatgacagtggtggaggtagagataatggcaagattcaagatattttttaaaagtggaggaagtggaatttactaacggactgaatacaggttgtgagagagaagggagagtcaagaatgactctatggattgggcctgaatagctgcaagaataaagatgccactcatgggtaagaaagacaataggaaaggcaggtttggcaggggcttcagaagaaggatcaggagtttggctttggatatgtcaaatgagatgcctatttacatccataaggaggtgttacgtggatttggagtctggtgttcatggaagatgtttgggttggagatataaacctgggaatgcttatgaaactcgggattgaaagattatcatctaggaagtgagcataggaagtcaagattgaatcccaggatgctacaaggttggggagaggaagagcaaagataactaagaaggaatggccagtaatgttgggggagaggaggaaaccaagacagagaggtgttctggaagccaaatgaagaaagtgtttcaaaaagaaggaattgagcacaagaacagactgaatatcaatagaatagaattgagtccagacataaactcttacatttatggtcattgatttttgacaagagtggtaagactattcaatgaaaaaagaataatcttttcaacaaatcattctgggacaactagatacccatatgcacaagaataaagctggactcctacctcatactatgcacaaaaattaactcaaaactggctgggcgtggtggctcaagcctctaatcccagcactttgggaagccaaggtgggaagatcacttcaggtcaggagttcgagaccagcctggccaacatggtgaaacctcctctctactaaaaatacaaaaaattaaccaggcttcgtggtggatgcctgtaatcccagctagtctactcagaaggctgaggcagaagaattgctcgaactcaggaggcggaggttgctgtgagccgaaatcacgccactgcactccagcctgggcaacagagcaaaactccgtctcaaaaaaaaaaaaaaaaaaaaatcatagacctaaatataggagtaaaaactataaaactcataaaaaaaataggagcaaatctttctgacttcagattaaccaatgatttctcagctatgacaccaaaagcacaatcaaaacaagaaaaaaatggataaattgcacttcaccaaaatttaaaacttttgtgctctacttcatacccattacaatggctattacttaaaaaaaacaaaacagaaaataacaagtgttgaagaaaatgtagagaaattggaaggaacccttgtgccctgatggtgggaacgtaaaacggtgcagccaccatggaaaatggtatggtgattcttcaaaaaattagaattaccataaaatttgatcaatccactttggggtacatagccaaaagactgaaagcagggactcaaaaaatatttgtataccactgtttatagcagcattgttcacaatagccaaaaggtggaagcaatgtgtgtcctgatgagtgaacagataaataaaatgtgatacatgtgtacaatggaatacgatgcagccttaaaaattccagagtgaaatttcagagtgaaattctgacacattacaacatagatgaaccttgaggacattacgctaagtggaataagccagtcataaaaggacaaatgttatttgattccacttacatgaggtacttagatcaatcaaattcatagagacagaaagtagagtagtggttgccagggactggggtgagatgggatgaggagttactatttaataggtatagagtttcagttttgcaagatgagaagcattctggagatgaacggtggttgcagaacaatacgaatgtacttgatgttatggaactatatatttttaaatggttaaaatgttccacataatattcagaaaaaacatggtttaaataacacattttatgttatgtatattttaccacaaaaaattgttttttgatttttagtaaagacaaggtctcactatgttggccaggctggtctcaaatttctgagctcaagtgatcctctcgcctcggtctcccaaagtgctgggattacagacatgagccaacagacctggccaatagaatttaaaaaaaaaaaaaaaaacaataaaaaaatgtatgcttcaaaggacactgtcaagaaagtgaaaagacaacccacagaatgagagaaaatatttacaaataatatatctgataagggacttatatccagaatatataaagaattcttacagctcaaaaacaaaacgaaaaaaaacctcaatttaaaagtggtccaaggcttaaatagacattactccaaagaagatagaaaaatggctgatgagcacatgaaaagatgctcaacatcattagtcactagagaaacacaaatcaaaaccacaatgagacaccacttcatatccactaggatggctataataaaaaagataataacaagtgttgccaaggatgtagagaaattagaaccttcatatgttacgggtgggaatgtaaatactgcaatgactttggaaaacagtctggcagttcctcaaatggtaaacagaattaccatatgacccagcaattttacttctaggtaaatacccaagagaattgaaaatatagttccatagaaaaacttgtatacaaatgttcatagcagcattattcataataagcaagaagtggtaataataactcaaatgtccgccaactgatggatttaaaaaatgtccatcaataaatattgttcagccagaaaaagaaatgaagtactgatacatgctacagcatccttaaaaacatcatgccagacacaaaagggcacatattttataaacccatttatatgaaatgtacataataggcaaattcatagaaacaggaagtaaattaatggttgccagaggctgggggcaaagagaagtggggagtgactgccaatgggtaagaggtttcttatggggtgatggaaatgttctgaaattagatggtgatgatgtctgcataactatgaataaactaaaaaccattcgattcaatactttttaagggactttaaggtgaattttatggcacatgaattataactcaataaagctgttataataaaaagaggaaagtgatcatcaactgtgtcaaattgctgactgataaaaagaagactgaaaatgaaccattagtttggcaatatggtggacatctaatggccctgatcaaagctattttggtggagtgacaggaataaaagaattgaattttatacaatgcacatgagagtacttaaaacagtacctggcacataccaagaaaaaaaagatgaaaactaactcaaattaatcataagctacaactagtaagcttagggcctaaaagatcccaagcagaacagtaaagaaagcagagttttcaaaagcttcgttatgctggtagtctctgtgatactgaatcagtttactaggttaggggactgctccagtgaagtctatgttggtgagagtctggcctgtgtgcttgtcctgctctatgcaagggagtgctggagcaccctgtccatgattctgtctgcagccctcaggccagactgagtactgagtcttggataggacccagaactgtgacttgctttcttattggtgctttagaaaacctccttctattcatcaagactgctgctactaccacctgcctaccatggcaccacaagtttctgcattgcctagaaggatgcagcccagaaaggaaactctgcaagctgaagagttagacacaagtgtcctcatcattggtgctcatgctaacatcagctcccaccaatatttaaagagcttgtaagaagtattgctttgatatttgttgtttctattgttgctgtgctgaaataatttctcattgcctgggaagaagaaaaagaggctgcaaagttatgaagacagagaaatccctcacagctgagaaattactgcctcagaaagcttcctggaagaggtgatatatgttgaagaataggtaaattctgctaggttgaaatggcaaacatagcattttatgttagaaggaagcatgtatatatgaatgtattaagaatagaaagtgcaaggcaaatttgtatgacagcaaagcttccttttgaaagacttatggtgggacaatgggagataagcctggaaatataaactagagaccaattgcagtgaccttgaatgcaaagtgaaggaatttagactctttttgataagttctaagaaggagctctagggaaatttgaaaagagaatgacgtaattttcattttttaaatgtaactttatggcttagtattatattcatatgattcaaattctaaaaattaaaagaaggcacacagagaaaaatctccctcccattccatttgttcacctaatacatttccccatgggcaacaatgtatccgtttcttacatatctttcattagataatctatacatatacaagcagacattataagtgtgtgtattgtattctttccctctttttatacaaatgaaagcatcttatacatactgctctgcactttgcttttttttgtatgtcaatatatcttagataactttccatttcagtaaagagctaccacattctttttatagctacacagtactatatcccattgtttggacgtgccaataatttatttaaccagtaattcctgatgaatttttaggttatttttaatctttgctattaaaagctatgcttcaaaaatagccttgtccatatgtcacttccacatgtgaaaatgtgtctgcaggatacattcctgtaagtggtgttgaggacttaaagggtatatatatatttgtaattttgataaattttgccaattaccttccttagagattatgccaatttatactcccatcccaccagcaacgtacaagtgcatattccctcacacctttgccaacacaatatgcttcacaatttagatgttgccttaggaagattaatcaggttatatgcataagaggacaaccccatttaaatttaaaactggatgaatatagcatatgctctttggataaatttaattttgattgggaagagtaattttaaagctacatatctccaaactgcctagaaaaatgttctcttacttcctgtagtcaaaaaacattccatttgcc

SEQ ID NO: 6914 - DNA, 17492 bp, Homo sapiens
catgtcgttaccacctggagtgtccaggtcccatcctgagactacccagtggggcagccccaccgtaaatcacatctagactacccagcgtgagcccaggccactggcaaatgaagacaatcctattaagcactatactccaagggcttggagatagatcacctgccagaagctgaggacaaagtcagagctctttagggcaaggttaaactccttactacacaaatcagttgtatgattattacagtcatgtattttatatttcaagaaatgtgtttgactattgtgaaatagagttgaagcctttcaaacctttaaaaccaacaactatatgttttgcatatgttaaaataaaaattatgacatactttggtgatagcaaatgaaaataaacttaattttaagttttgcttgggacagaaaaagaataagaaggcaagaagcaagaagggcagatcatttgtgtgtccctacagttatcttgcagtttaccatcattgctaccaacagattttattttcttctttaaaatgagaaaatgccacagattcaaagagattatggagacacaacaagtgggtgcaatgtaggatcctggattggatccttggaaagaaaatgatcgttaggggggaaactagtgaaacacaaacaaggtcagcagtttactattaattattaccatgatgcctttgggaagccgagatgggtggatcatgaggtcaggagttcaagaccagcctgaccaacatagtgaaaccccgtctctactaaaaatacaaaaattagctgggcatggcagcgggtgcctgtaatcctagctactcgagaggctgaggcaggagaatcacttgacctgggaggcagaggtagcagggagcggagatcacgccactgcactccatccagcctgggagacagagcaagactgtctcaaaaaaaaaaaataataataataataataataattaccatgatgcatggtaccaatgctaattttctggtgttattataattctgtgagttgttaatattaggggaaggtgagtgaaaaatatatgtgaatcctctgcattgtttttgcaacttttctgtaagtctaaaatcatttcaaaatgaaaagttaaaagaaaaaagtttaaaatgatctgtctctgcatattcaaggattctcaatcattttcatctttttggagatcaaccaactctttgatgaaaagtaggtaccttcagccaactctttgatgaaaagttatgtaccatctgtcctaaagagcctcaagtccacttcatagtttggatgtttgtaccccaaaccttatgttgaaatttgatccccatgttggaagtggtgcctcacaggaagtgtctgggtcatgagggcagatcctcatgaatagattcatgctctgagtaagttctcactctattagctcccttgagagttcccccattagctggttgttaaaagaacctggcacctcctctgtctctcttgcttcctctctcaccgtgtgatctctacacaccactctccttcacctcccgccaagagcagaagcagcctgaggcctccccagaagcagatgttggcaccaggcttcttgtacagcctgcagaaccatgagccaaataaccctcttttctttataaattactcaacttcaggcattcctttatagcaacactaaatggactaagacatccactgttgccatttcatcagttcacagacccacgtggagcccatctgtgggcctcagtgaagaaccctagctccagggtccacagctcaggactcaggtgtgagaggaagtagcatccaacagttgatctgatgaggaacacctagttcccacttcagctaaggaaggagaccacccttcatattgtcttatgcccaatttctgcctccaaagaaaaaagcagtgaaaactaaaaggcagaaatgaaatccacaggcagacagcccagtgccacaccctgggcctcatagttaaagatcgacccctgacctaatcgggttatattatctatagattacagacattgtatggaaaagcactgtgaaaatccctgttctgttatgttccgttctaattaccagtgcatgcagcccccagtcatgtaccccctgttgctcaatcgatcatgaccctctcacgcggacccccttagagttgtaagcccttaagagggacaggaattgctcactaggggagctcagtttttgagacgtgagtcttgccgatgcttcctgctgaataaagccctgccttctttaactcggtgtctgaggggttttgtctgcagctcatcctgctacacagccacattcatgtctccagcctctggccacgtgggagaccttcctacaaaatgggagacaggaatgcaggacttcatgctcctccatgacatttcctcaaaaggttcattatgaaagcacagcaatcacgtgcacaatacagggcacatagtctttgtgagctgaggagcaccataaatacatcctaaaggggtcctgactgcagccccactaagtgacaccaaacagggtaatcagatctgggtatcagagcctctgcaggaaatgttggcttagcccacagtgctgaaaacaaatgcaattttgtactaggtgtgggtcatctgctccaccccacactttccctcccactttctggcttataaacaattccatcaagaggttaaagaagggcacagctggctaaatggtagaaatgaaaggcaagacccaaaatctgcctgaagcttgcagagatagcttccatcagtatgatttttatatgaatagttgtgggagttatgaggggacaagagtaacgatgcacacactaggctcatgaaggccaaagtcttcatatcctgagtttataaatcaggtgctagtgaaatcaaacacaagacacatttgctcaaaaggacaaaggcggcttcagagaaaaggaatggtttgtccaaggagaatccacgatcacttccagccctgagaaatggctagcacatcaggaaatgcttggacagctctagcccaggttcaacaacctttccaaagaatcacactaaagcacagatccctttatcctgggggtccagctgcccaagcttggccaccaagacagagggatctgcaagaaagctgactttctccaagcactgctccataatggacagagtgagaggagagtgtggagtggacagaaggctcgcacagtgcagtgagtgtgcagagcactgaggaaggaggaacacagccagtggggactgaagaggcctgcatttctgacagggactggagtagacacagatggtaagcacgatggaaagtgttctgatcaaccccctaccccaggagggtgggctctcattctaccactctagacccaggtgcagtcatgcgccgcattataacctttcagtcaacgactggccatatatacaacggtggtcccagaagattataccaccatatttttactatagcatttctatgtttagatacacaaatacttgccattgtgttacaattgcatgcagtattcagtacagttactagcatgtgactgtactgaatagagtctaaaccactgagccttacactgagtcttacactgagtgtgtaatgggaggtaccatctaggtttgtgtaagtacattctacgatgttcaaagatgaaattgcctaacgatgcatttctcagaaggtgtccccatcactaagcaccaaatgactgtatttgttcagaactatggcagcaagtgaaggcttcagcttccctagaccttcacagtctcatggaaacttctagggcagccaatcctttcaaaggaactaaaagtcctttcaaagccaataattcacttcagcaacctggaccctaaggctttcattccacaattaggatacaattatctgattatttttccccaaagaaaaaattctagaaggaatatgtgcatttttaggacttttggtatgcactgccaaatgtcctatcagagcagtcatctcaatttacacacggacagacatgtccacttccccagtctcctttgcaatctttgccatttagtacttgggaagtaattttcatttgtttcaattggaaattttataaaatgaataatgaatgtattttcctttcatttgtgtgtgtgtgagttgctgtcctttgccacatttctagtgaactgtctttttcttattgatttgtatggtgtctttaagtatgacgattgctaatattttcccagcttgtcacatgttaacttcatttagtggtactttggccacacagaagtgctggatttaaatcttcttccttattgtttctgcctttgttacattggttaagaaagccttccctggcagagcttgcagtgagccgagatagcgccactgcactccagcctgggcgactgagtgagactccatctcaaaaaaaaaacaaaaatgaaagccttccctatgacaagattataagaagattaatccatgtgttcttctgggcctttgtggctctgtgtttcccattttacattaatccatctggaggttctcttggcatgggagttaggtaaacattcaactccccgaccccaccaatgtctagcccttgtcataacaccatttattgaattatctgtccttcccctaatattttgaaatgcctgcaaagtgaggaaattgttctttggtaatttttcaaatctacactgcggatgatttccctttcaccctcaccccacaccctcccttttgttgagtatttgccttaagatgcaggtggtgggtgaggatgtgccccattttgcagctgggcagtctgtctatggaggctggggtcacatcaaccccaatcctaacagctttctcccctgctttgggcccttcaatgtgtccactttcctgagacgccttaagggaatttatgcagatctataaaagtgccgatggtcccccctcacagccaccttttcccaccaatgctttgtcatgtaccttcacggcaggatctgaaacttgtcctagtgtccacagccggtcttgaccttaacagaacctatgtacccttgtgtgaagcagaggccgcagccttaggactctgagccttggcctttgctgtgtgccgccctccacccctttctcagacttgggaggagtgaggagaggagccacctggggcagttcaggaatggggagcttcaggacagtttgcaccacacactctgggacttagctgtgcaacaccccgacccccatgtgaggaaggtggtgtttgtttgctccaccagactgtcagctcctccctaggagcacggagtgtgtcttgctcacattcgtatccccagtgtcagcacttaaaatggattcaacggataaatgttgaatgaaattcagaaatgatgtgcaatagtaaaagctaacatttaggaatcaacttattacttacacgacacctttgcatattgagtgaaattaagttgtttgatttaacaaatctgtggctttggggtagagaacaagaacatagcaagaggaagcattctttattagtccttcacgaaagaggatggacagacacatctacggagaggggctccagaggcagggacccagagatacacccggccaggcagaacagctccaggatgtggccccgatcctggaaaagtgcgtttaaaagaggcttaaggcatatcagacagcctggccaacatggtaaaaccttcatctctactaaaaatacaaaaaaattagccaggcatggtggcacagacctgtagtcccagctacttgggaggctggggcaggagaatcacttgagcccagaaggcggaggttgcagtgaggcgacaccgtgccactgcactcaagcctgggagacagagtgaaggaaaaaaaaaaaacaggcattattagagaggctttatctcctacgtgttcaaaagcaaccatgctcctcccagtatctcaggacgactggactgcctgtgttcctgttgctcttcacagaagctccatgaaagcgggcttcgcttttgttcatgcagccagaggctcaacacatgacctcgaagccgccaaggctttatcaaacggatttctcccaaaaacttcgtttccttccgcgacgccctgcaagaaccctgtattcctgagtccctggctcagcgtctgctaccccgatgctgtcaatcagatcctgctaatctgagcggccgtggctccgtcccggctccgcgtccgctgacaggtcaccgctgtgagtctccggattaccagtccaaacgggacggcttgaggtccccgcgccctagggacctgcggggcccgagcgcagggcgcgccagagaactacatttcccacagagctcttgggaagccggggccgccgagacccacggcccggcgggcgggctcgcggggagactcctgggagttgtagtccattccgccggcgccggcgctggcgctgctgcgggctcggcgccggcctttgtctgcgggcacgcgccgctgcggtgagtgaggccgctggccgggtcagagcgccggggcaaggcggggctgcgccatcagaccgctgtcccgggccctccgtgtggccgccttatgccagcggccgccaaggaaatgagcaggcctggccggcccgggccccgagggaggccagccgcgagcggagaggtcggcggtccgcagagcagggtcccgtggaccggagagcgggatgccgaggttcaggacgcagggcgggcccggtgcccggggcccggggcctgaggcgggagggcagcgtctgcggagaggagcagggcccatggcgtcggggcgtgggagggggaggccgcggcaggctcacccggcctccgtgcgggcttcagcgagtgcgggaagccggtgccggccttccggggtgggaggagaggcagcccctgcgggggagagtaggaagccaggcagcgtgtgggaaaccacgctacccacaagctcctaaacctgaaactggccccaggacattttccagaccgccaagtgtacccctcttctcatccgccctccagaggacgccggattttagatcttaagtctggtggtctcgtctgatactcctcttgtttggttctttccttctcattgtcctacctgataggacagtgttagtaacctgtttaataagtggggaagcagagtcagggctgctgggttactcgcccaagatcatatcctgggggagccacggcaagaagccaagactcacggactacttctaagctttttccaaaggatatagtagyctttctaataggaaaatcaatgtttttaattataaagccacttttacaaaatcttggggaaactgcttcctcagacctgtgatctagggagaaaaatatgacaatttctcccttactaatcacggaggtccctgataggcggcggagttgtaacttgaagacctcacagcaggtggagaggcagagctgtgaattctactctaatttctggaatccccggcgacagagtccaaccccaggcagcaggcgccatgtaccccagggacttttaatgtgtgtgcagctgttgagcaagaataccttgaacttccaaatgatktgctggcatgctggtagggaattcctttgcagcttgtgttccaagttggaagtgagtcctccaaataaaaatttaaatgattctcctggtcatcacagcatgtagcagaatgtgcagttgtcaagaagaaccaggtgcttaggttgacaaaacaaagaatggtagcatcatactattatttcattaaatcagaaggccagcattttgataggacaaattagagggaaacaaggagtatgcattgaaccactgcatttcttaaaagtrtaagaattcagtaattaggatcctgaagtaagaagaaatatttttttwaaaaaatagatcatgtgggccaggtgtagtagctcatgcctacatgtcttgggaggccgaggcaggagggtcacttcaggccaagagttggagaccagcctgggcaggataatgagacccgatctctacaaaaaaaagttaaaataatttttaaaaattagccaggcttggtggtgcttacctgtagtcctagttatttgggaggctgaagtgggaggatccgttgagtccaggagwtcaaagtcacagcaagctataattgagtcactgtactccagcctgggcaacagagcaaaatcttgactcagaattttaaaaaaattaaaaaataatttagagcacatacaagaggattcctaggatctgaaagagyacttcaatctggtcaaactctcttcctttctgttcaattttataagcattctgaccagctctttagtgattaggaactagacaactgtctaatgtaagagcatacattttggatccagaaagtcttggatttgaacctttgctccactttgactccttattttctgtgggtttytgggcaagttacttaacctagttggagtgccttgggcttggagtccagagtaggtctttcttttccaagaattgacaagtgtttacacttggtcagaactggtattcttgtatcttcaagagcaagagaaaggcgagtctgggtctggagcctcctaagaattgttcagtggtaacaaatggactctcttgttaagtctttgtaactacagataactggagagctgattggctccaaccaatcatgaaggctgaaatgttgttttcttagattctgaattcctctggggcttggagggaagaaartagtaggtggttaggtggggaaccaaaatggaagrtcccaattacatgccaagaccaaagtgtaaacaggagtgactrttaacttgggattggcaggaagagatatatgtttatgtgttctctgctttcccacatcctgcttcctcctagactcatttgtgtgtggtcctggtacctttgggcccattttgcagtgatattttagtaactgacattatgtcaaacaatctaggtttcttacattcacttatgtctcaacaactgttgactttttccttctcacatatcaattattctgccctttcctgtttgtttctgtttgtttttctccctcaggtgctcaggaacagcccatggaagaatcatatgaagaggtggtgactgaggtcgtaagcaggagtggacatgtttggatttccaacagctaccctgctggactgtcatggaagatatgcccagaatgtagcgttcttcagtgagtgagtcagttgatggctggatgcgctcagctcacagatattcagtgtccctgttctcagcactggtcggcagtctgaggaagcagaggagaccttgctttggtagagcttgctgttcctagggttataagaaaagcctgtgagctggagttagaagtaatagtagaaacagagcaagagaaccatcttgatatggaggtagcgttgaagtagtctctgagaatgaatgagcagcttaaatctcagcactgtctctgaataaggcaagggaacaaggagaagattaccctggagtgacagacaccaagaaaactgttaatggtgatgaatggacccatatttaaagtgcaccaggaggctcagatgcagggcagtattcggaaaaaaaaaagtcaatatctgcatagagaataacttccaaaccaaaattgatttcagttttgccatagcttagtagactgaaaatagcaaggattttaatgggaaaaattccttggatcagattctataattgccatggctagatctgcagtatcagacaggttatttaacttccttaagctccaggttcgtctgtaaaataggacaataagttctatcttgtagggttgcagggattagcaatgatagatgtaaagtacccaggattgtgctacatattttctgaggtcatggtgcttattctattgtcagaacagattggacagaggtggatttctgaagaagcaaatgcagcttcagttttaggacccctcacttggattggtctctccaagaccctgtgcttaattttatacattttcttaaaagggtgcctctaaaatgggaaagttttaggccttatatagcctggatccacacctgttttggagtcagataaaagttgggtatggggctctgtgtgattctgtatagttttctaaattttctgagcctgttttctgacctgtaaaatagagaaaaccatgtctatcttacaaggttatttgttggcctaaattaaatttagaggcagtacactgctatggagaatgcctatttgagtcagctctaacttacctagctctgtgacctttgacaggctccctttgctcccattatctgtatcactctcatggcattgttttcaggattgcattgtctatgcaaagaataaggcctggcacatcataagcactcaaagtattatgtttctttttccctattctaactcagcattattggtgcttcttatatgacttccctctcattttatcagatgtgatgactgaagcccaccacaaatatgaccactctgaggctacaggatcctcaagctgggatatccaaaattctttcagaagagagaagctggaacaaaaatccccagattcgaagacactacaggaagattcacctggagtgagacaaagggtctatgagtgccaggagtgtggaaaatccttccggcaaaaaggtagtctaacgttacatgagagaatccacactggtcaaaagccttttgagtgcacccactgtggaaaaagcttcagggccaaaggcaatcttgttacacatcaacggatacacacgggagagaagccttatcagtgcaaggagtgtgggaaaagcttcagtcaacgaggtagtctcgctgtccacgagagactccacactggacagaaaccctacgagtgtgctatttgtcagagaagcttcaggaatcagagtaaccttgctgttcacaggagagttcacagtggtgagaagccctatagatgtgatcagtgtggaaaagccttcagtcagaaaggaagcttaattgttcacatcagagtccacacaggcctgaagccctatgcctgtacccagtgcaggaagagtttccacaccagggggaattgtattctgcatggcaaaatccacacaggagagacaccctatctgtgcggccagtgtggaaaaagcttcacccagagagggagtctggctgtgmaccagcgaagctgctcacagaggctcaccctttgaccactttcctgaagagaagttctctttatgaattaagagtacaaaatcctctgagatgaagcaacctatccagttctatggaatgaatggagaatctttcagaaagaccatcattgggtagggcaaactgatttttttcctttcccccaaaagagtatgaaaaataaatgtcttgtttattatcattatcatgtatgttttataatttctgtcactttattctgacctgatttttcaaggtacccccattaatctggtgccacactagagattgttctgtgtatacccaatacagattttaaatttgtagttgacaccatcaggcttttataaatgtaaaaaatcagcccctcatcaatcccaagttatttttcttccttacatattcaaattaatcttgttttgccttcaaaaccactgggcaaaatccatggggcaaatctagttacctttataatcttcttgttgaacatttcattacctggatgatacccccaataacctattgtaactaatcactcatgtctatagcaaggggcctagccttttattacaaaagaaaatttctttccaagcctgcacagccttagtttgtgcattgagacatacttcagtcctccactcctaactaggatagagataattcacctgtaaccaaagagcaaacaactactgtctgtgcaatttttaaaaatctttaacccatttctccccatctactaaagggactcctacattttcagagaccttcactccctctttggtaacagcagcaatatcttggggttgggttatctagaaaggatataagtgttattactgaacccagacttgtagtttgtagtcaataatgaacttccactttccaacaatactatcctcttcctcctgcacacacaccaagaaatttggaattctaacccatccttttttctgacctccaggggatgagatttgaagaaggctgcagaggagaaattggttttgaggggaaatttccatttccattttttaaaatcttagccatctctataatttttcatactgagcatttatgtaagtgaaatgatgaatgatagagattttggttttcttggtaagacaccattccatcctttctagtggatcctataaatcagtggtccccaacctttttggcaccagggaccagtttcataaagacaattttcccacagagggggatgattttgggatgatccaagcacattacatttattgtgcactttattattattacattgaagtatataatgaaacaattataaggtactcaccataaggtagaatcagtgggagtcctgagcttgttttcctgctactagacagtcccatctaggggtgatgggagacagtgacagatcataaggcattaaattctcataaggagtgcacaacctagatccgttgcatgcacagttcacaatggggttcacactcttatgagaatctaatgctgccactatctgacaggaggcagagctcaggtagtaatgtgagcagcaggcagcagctgtaaatacagatgaagcttcgcttgctctcccaccactcacctcctgctgtgtgccccagttcctaacaggccacagactggtactgatccatggcccagggttgggaaccccctgctataaattattgcttccttaatcccaaaaagcttgtaatagtaaatctttaccatgtagagaggtaaatttcaaaggtctttgagcactgaaacaatttggaaacactggattctaataatacaaaaatattccaaagataccacaataacatttgaagctgtatacaagaatgttcatgtcatcttcatttataatagccacacacttagaaatgtccaacaatgggtgagggataaagaaactgtagtatatccatacagtgaaatacaactcagcaataaaaaagaacatacacgtggtacatcaacaatatggatgaatctgaaagttttatttgagttgaagaagccaaatacacaaatagtataattccacttatgtgccttcacagaacaggaaaaactatgtgtgaggattgacttgaaaggcacgcaagggaagtttacagagtgaaaacaatgttctgtacctgacatcaggcagttgatgcaggggtctaaacaattaccaaaattcattgaactcgatgcttaagatccgtgcattttattacatgtaagatatacttcagtaaccatgaaacagtataaatgtattgcccacaagctctttgacactcatcccatgaagagatggggggtatgtcaccaccacttgaatctggacacgcttgtgactgcttcaaacaatagaacacaacagaaatgatactacaccaagtatagttctgaaaagcctctaaaaggtctgaaaaatttctgcctggttctcttgagacacttcctctcaggtgaaaccagcccatgtaaaaagtccagttatcctgaaatcactgtcatggacaagctgcatataaatgctccagccaacagtttcagctgagctcccaacagcctgccagccatgtgtgagggtcattgtaggtttccggcccagtagaaccttcacatgactgcagccccatctgacatctggccaaaactgcatgacagactccaaagtgagactgcctcacctaatccctgacaaaatcatgagaaaaatgaaacattatggttggataccactaaattttcaggtaatttgttatgcagcaataatagaataacttaagtactttttaaggataagccattgtaaaatttatatataggaaaaatctgaggccaggcacgatggctcacgcctgtaatcccagcactttgggaggccaaggtgggtggatcacctgaggtcgggagttcaagaccagcctgaccaacatggagaaactctgtctctattaaagatacaaaattagccaggcatggtggcgcatgcctataatcccagctacttgggaggctgaggcagaagagtcacttgaacccaggacgcagatgtcacagtgagctgagattgcaccactgcactccagcctgggcaacaagaacaaaaactctgtctcaaagaaaaaaaaaaaaaagaaaaagaaaaacctggggaagcaacttgatattacctcactggctaaatcaaaataggaaattatggtttatgattcatcagaaagcttaaggtttaaaaataaacattctctttgacaaaataagaggcatggtataggttagttaactgagatctaatccaagttataaaatgaagaagtagatgctggactccagcagtactgcactataagaaatgtaaaaatatatgcctatatgtatacttatactttcagaacctcaaatatatatatgtgtatatatagatagatatagagaaagagctatatagatatatataatcttaaaagcatagttctgcaaaaaggaatgagtaaataataaagagtaaagaggtcagaaaatatatcattggccattggtgatcaactaaacctttagaccctctcccctccctgtggtaggggggtgctgaaagttccagtcccctaatcctactttggtctttatggtgaccagccccatcctgaagctaccttggggcctctggccatagtcatctcattagcataaaaaagacactcttatcactcaggagattccaagagagttagaagctgatatgtcaggaaatggagacgaaaaccaaatatataggccagggtacggtggtttatgtctgtaatcccagcactttgggaggctgacgtgggtggatcacttgagatcaggagttcgaggccagtctagccaacatggtgaaaccccatctctactaaagatacaaaaattagacaggagtggtggtggacacctgtaatcccagctacttgggactctgagacaggagaaccacttgaatccaggagatggaggctgcagtgagccaagattgtgccactgcactccagcctgggtgacagaatgagactctgtctcaaaaaaataaattaaaattaaaattaaaaaatatatatataatgcaatatcacaggtcccaaatacataaagcaaaaattgagagaacaaaggaaatatagacaccaccaaaatcccatagttagagatgttgacaccccctctctcaacagctggtaaaattagggaaaaaaaaacagtaaggatatggaagatttgaatagcactatcaaccaacttgatgccattggtatttgtgggacactacacacatcaaaagtagcatacacattcctttcaagtgcacatgaaaccttcaccaaaacagaccatatgctgggccacaaaacaagtctcaataaatttaaaacatttgaattatacagagtatattctttggccactacagcattaaattagtaatcaataataataaaatatctagaaaattcccccaattgtttggaaattaaactatacacttctaaatcacttatagttcaaagaataagtcacaaagaaaattggaaaatattttgaactgaatgataatacatgtcaaaatctgagggctgcagttaaagcagctctttagggaattgtgtagctttaaaatgcctggattagaaaagaaaaaacataaaatcactatctgttacccacttgagaagctagaaaaagagttaatcaaaaccaaagtaagaagatatttgttcataatagagtagatcaatgaaactgaatatcagcaaaccagaagttagctctttgaaaaggttaataaaactgataaactcataccaaggctaatcaaaaaaaaacacaaattacaaatatcagtaataaaagaaaggacatcacaacaaattacaaagatattaaaggaataatgaaagcatactgtgaacaatgttatgtcgataagttcaacaacaaaaatgaagtttacaaagtctttaaaagacacaacttgccaaaatgacacaagaagaaacagaaaatcagccgggtgcagtgggtcacacctgtaatcctagcactttgagagaccaagacaggaagatcaccctgaggccaggcatttaaaattagcctgggcaacatactgagaccctgtctccaccaaaaaaaaaaaaaaaaaaaaaaaagaaaagaaaagaaatagaaaatccaatatccctatatctaataaagaatttcaaataccttcacacaaagaaaactgcaggccaaatggcttcactgataaaacgtaaaacataaaaaaaaagtattcctacacattttttcagaaaatgaaagagaatatgcaccaagtcattgtataaaatcagtattactttgactctagaaccaaagatatcataagaaaagaaaattatacatcagcatccctcatgaacatagacacaaaaatacttaatattttagcaaatctaatcaaacaatacataaaatacataatacatcatgataaagtgtagtttgtaaaattaatgtgcctttgcaagtctaaaatttttccccatcacagcaccatattatatgcccaagtaaagacccaaatctgtttcatctacctagaatgtcgataattaagaaaatgtatatatgtaggggtgtgtgtgtgtgtgtgtgtgtgtgtgtgtgtgtctgtagagctgatcttcattattcatacattccattcttacaaatatacctacttgctaagttttatttgtaaccctcgaatcaatttactgtgcttttgtggtcagtcattcacagacatgcagaggacagtgagaaattcgagtcatgcaacatgcacattcccagctaagatcaaacaaagtattattctgtcttcttgtttcaattctcacattataagcaagtggccttttcacaatatatttagtgctatgtttttcacaggtttgtgctttttgttgatgattttgctgtttaaaatgacttcaaatgtagtgctgaagtgctctctgctgttcctaagctgtgatgtgccttgtgaagggagaaaacacatgtgttacataagctttgttcagggatgagttatattcctcttggcaatgagtttaaagtaaatgaatcaacaatatatattgaattaggtttctttaaacaaacatacataaaacaaggttatatgttgatcagattatta

SEQ ID NO: 6915 - DNA, 15357 bp, Homo sapiens
tcagtgacattaattatattcaccatgttgtgcagccattatcactatccattaaaggaaccattttttttttctttttgacatggagtctcgcactgttgcccgggcttgagtgcaatggcaaggtcttggctcactgcaatctctacctcccggattcacatgattctcctgcctcagcctcccaagtagctgagattacagcagcccaccaccacacctggctaattttttgtatttttagtagagacggggtttcactatgctggccagactggtctcgaactcctaaccttgtgatctgcccgcctcggcctcccaaagtgctgggattacaggcgtgagccactgtgcccagcctaaaggaactatttttacatgataaaaaacaatggtatggagtcagcaaggaaaaccacaataacacaaatgctgactttcctctcttccactacttctactctccttgcaacttagtagcctcattttgagaggacataattttaagaaacagttggcttgtagttaaggcaaagaggagtggggatgttctatgtaaaggttgataagatagggtaacctgttttcaatgtaacagggattgcagtgagcacaccagatagcatctcccggcagggggtagtgagagaatggtcaaattgtggaggcctagcttgcaatggcatgagactgtgggcagaaattaattttaacattttagaattaatttttgttggggatttccctgcagggctgctgcacgtggtgagggctcaacccctcaggcactcctgtgaggcccctggtcacccaggggcacctttaggctgggaggggcaaaagccctttgtcttcagagctgaaaaactcagtctctcatttagctttgaaaacaacagttcagttcctcagaatcaagataaattttaggagaaaaagcaatagagaattccctttagaatgcatctctgaattagaattaggatccttaaacaacaatttcctaggagaaaaccagctcagaataaatcaaggactgtcaaacaaagggaggtctggggctcaggaggacttacccgttccaccgggggagaagcttgaactcagtgggacttcaacgggccgctgctggtaccttagctctggtttcgggcaactctttcagggtcctgagtcttctctgaggcctcatgtatttgggcaccaaaatattgtcaacaaaaagagtcaaactctataaaatatttgaagatttattctgagctaaatatgagtgaccatggcccacgacgcagccctcaggaggtcctgggaacatgtgcccaaggtggtcggggcacagcttagttttatatatttcagggagtcatgacacatcaatcaaacacacttaagaaatgcattggtttcgctcagaaaggtgggacaactcaaagcaagggcttccaggctaaaggtaaatttaaatcttttctggctgacaattggttgagtttgtctgacccgtattaatttcctagtgctgccctgacaaagtaccataaacttggtggctaaagccagcggaaatgtatggtctgacagttctggaggcccaaagtcaaagtgttggcagggatggttccttctgggggagaatctactcagtccactaatttaaatactaatctctagtggaaacacctgaacagacacacgcagaagtaatacttaaccagatatatggatatttcatggccctgttaagctgacacataaaattaatcatcacagaagctcacctatgattaattgatttttttgagggtgcaaaaagctactcagtgatgagtataataaaatattagaaagagtgtttttggttgactcagaattttggctaaaatctaaagctgagaacaataggtgttaagaaatcctatattccaaagagagttcttagcttaccctacaggactttccaaactggtctaaggacaattaccaacagcccatatcaggaaaagatagagactgattgaaaccacctttgcgaaattatgacagtaagagaaaactgacatagttgactccattttgcttctaagctacaagatgtcttcggtgattcctcagtgtaggccaaactaacttcaggaggcacttaatttatactttaaccttagagcaaagatgataatagccctctcctaaaactaaaccacctctgtaaaactaatgaaaggccacaggttaggattaggaattatgagaggggcctgaattctgctaaaatgtaggcaaagtgaaacgataaccagccattgttctggaggtcacaagatttgtaacttccccaattactcctgtagatgacatcaactgttatagaacccaagattggccttttgagatttttttcagactgttaacgtttctcatgaccagctgactcgggccagacctgcaactcatgagtcaatcagtcctgtagccctacccagaggccaattcagtgcatgaagactattttccacactcctatgattttaccccaatcaatcaatattccccattctctagccctctgaccaccaactatcctttaaaacccccaaaactttgagccttcagggagactgatttgagtgatatttctggttctactacatgagttagcctcctgtcaatcaaactctttctttactgctatgccgtagtctcagtgaattgattttgcctgtgcagagggcaggaagaaactgccggtgattacatgattgcagagacaaattccttgaaagaatttgtgaatcaaaagattgctggggtctgggtgtagtggcttacatttgtaaccacagcactttgggaggccaaggagggaagatcgcttgagcttaggagttcaagactggcctggggaacgtagaaagtcatcatctctaacaaaaataaaaaaataaaagaattagctgggcaaggtggtttatatctgtagtcccagctactagggaggctgaggtgagaggatcacttgagcctgggtgatagaggctacaatgggctacaatcataccactgcactccagctagggtgacagaatgagactctttaaaaaaaaaaaaggggattactggggtatttcccctcccaccctgattccaagtgagaggggaaacaagagggcactttggggaaattgggcactgcttgctgaaggcagacagagtcttactccttggctctatgcttgctcagctatgggagcttgtaaatttgagacagcatggagaataaaaaagtgtttggaagaacctgacctatgtcccttactgaagaggacaaagacacttttgtgtgactattgtttagagaggcccagtggtgagaagttagcagaagttgctcctgatgacagggtaaggtggggtggcttcaaggctcagcttcactatttggtgagtgggtatatgagctcccctcatcccagaagtagcagatgtgggtttgcgtcctctacaaagggctttatccaagaggactccctatcggtgggagatcctacaagaaagaagccatgttggatgcttcactagaagttgagagctaaggtaaagtcacaggaggcctcccagagagcatctcacctgtatcagggaatgatgcagtgcagaaattcctcagggatgtatctctgtgtaggatctcctaaaaatccattgaagaaccccatgagagacaattggtatttgtgtattgtatcagtcaggtttcaaccacagaagcagaaccagtagaagagatacatacagtcatgcacagcataatgatgtttcggttaacaatagatcacacatatgccgtaattatatccataagattatagcgaagctgaaaaattcctagtgacatcctatctctagggacatcatagctgtcataacatcacagcacaacacattactcattactcacgtgttcgtggtgatgctggtgtaaatgaacctacttcactgccagtcatgtaaaaaccatagcacatacggttatgtatgatacataatacctgatgataatatgtgcctctgttattgatttatgtacttaatataccatactttttttttttcttttgagatggagtttcactcttgtcacccaggctggagtgcaatggtgtgatctcggctcgctgcaacctccgcctccccggttccagcgattcttccgccacagcctcccgagtagctgggatttacaggcatgcgccaccatgcccggctaattttttgtatttttagtagagacgggtttcatcatgttggccaggctggtctcaaactcctgaccacagatgatccgcccgcctcggcctcccaaagtgttgggattacaggcgtgaggcaccgtgcctggccattatactttttactgttattttagagtacattctttatacttatccattaaaaaatttgttaattgtaaaacggtcttgggcaggcccttcaggaggttttccagaacaaggcattgttatcacaggagaggacagcttcatgcgtgttactgcccctgaagaactcccagtgggacaagataaggaagtagaacagtgatattgatgatcctgaccctgtgtaggccttggctaatgtatgtttttgtgtcttagtttttaacaaagctatttaaaaagtaaaaaaaaaattaaatagaaaaaaacttatataataaggatataaagaaagaaaatatttttgtatagctgtacaatacatttgtgtggtaagctgtgcgttcatacaaaaaagtgtagtttggagatttctcgaagaacttaagacagaactaccttggaaccaacccaaatgtccatcgatgatagactggataaagaaaatgtggcacatatacaccatggaatactatacagccataaaaaaggatgagttcatgtcctttgcagggacatggatgaagctggaaaccatcattctcagcaaaccatcacaataacagaaaaccaaacaccacatgttctcactcataagtgggagtcgaacaatgagaacacatggacacagggaggggaacatcacacaccagggcctgtcagggggtagggagctagggggagggatagcattaggagaaatacctaatgcaggtgacgggttgatgggtgcagcaaacaaccatggcacatgtatacctatgtaacaaaactgcacgttctgcacgtgtactccagaacttaaagtaaaaaaaaaaaaaaaagacagaactaccattcaactcagcaatctcatcactgagtatatacccaaaggaatataaattgttctaccaaaaaggcacatgcacgtgcatgttccttgcagcactattcacaatggcagagacatggaatcaacctagatgcccatcaacagtggactggataaagaaaatgtggtacatctacaccatgaaatactacacagccataaaaaataaaatcatattctttgcagcaacatggatggagctggaggccattatcctaagtgaaccaatgtaggaacagacaaccaaataccacatgttctcacttataagtaggaggtaaacatttagtatgcagggaggcagagtggaacaaaagacactgagggctacttgagagtggagattgggagagagtgaggatggaaaaactgtctattgggtactgtgctcatacctgggtaacgaaatcatttgtacacccaacccagtgacatgcaatttacccatgtaacaaacctgcacatgtacccactgaacctaaaataaaagttaacacaaaaaggaaaaagtttattaagtaaaaaaattagaagaagctaaggttaatttattattgaagaaagagatttcacttcacggcagctgtggcctgactgtgaggcggctgaccagcctcagctgagagtggagtggtggccgtggccctccttaggagatcaccatatcacctcttactgtggccttaccatggcgacctatgggcagacctgcatgtggccagtgtggatttcttcatcatatgttaaccttggcaaagctgccagagatatttttaacaaaggatttggtttggggttggtaaaactggatgtragaacaaagtcacgcagtgctgtgggattttcaacatctggttcatttaatgcagacactggaaaagcttttgaagtcttggagaccaaatataaacggtgtgagtatggtgtgactttcccagaaaaatgagacactgttaatactctgggaacagaaatcacaattggaccacctttgtcaaggtttgaaactaatatttgatactaccttcttagcaatcacaggaaacaaaagtggtaaaatcaagtcctcttgcaagagggactgcataaaccttgcttgtgatgttaattttgattttgctggacctgcaatctatgcttcagctgtctttggttacgagggctggcttgctgggtaccagatgaccactgacagtgccaagtcaaagctgacaaggaataactgtagtgggctaccggatgggggacttcgagcttcacactaataacaataatggggcagaatttggaggctcagtttatcagagggtatgtgacaatcttgatacttcagtaaaccttgctcggacatcaagtgccaactgcactcattttgtcttgccactaaatatcagttgcatttcactgcttctatgtttgcaaaagtcaacaactctagtttaattggagtggaaggaaagagacttcatttacactcagactctgagcctgctgtgaagcttgcactttctgctctgctagataaaaagtgcattaatggaggaggccaaagacttgggtttgtcctggagttggagacttaatccagctgaaagaaatggcaatggatatcagaagatttggctttaatatactttcattgtgatcagcaggctcttcccacaaagaaggtgatcaaaacaaaggctctaaacaagagctatattttaaatatttaaacagctactcgttagctggtttctagttgaattggttatgtatytagttaccaatatgctgcaaccgtgcagtcacctacacattatttaagtatatttaactgttamatgcactacccaccaatcatgaaataaactttatgaaaaaaattttttaaaatgaatttactatagcttgagtatacagtgtgtataaagtctacagtaatgtacaataatgtcctaggctttcacattcrctcaccactcactgactcacccagagcaacttccagtcctgcaaaccccattcgtggtaagagccctatcgaggtgtaccatttttaatgttttatactgttttttgatggtaccttttctatgtttagatacatttagatacacaaatatgtgccattttgttataattgcctacagtaacatgcagtccaggtttgtagcctaggagcaattggctacaccatataggccaggtgtgtggtaggctcttccatctaggtttgtgtaaatacaatctatgacctttgcacaaaaacaaagttgcttagggttacgtttatcagaacatatccctgtaattcagtgatacctgtgttaaaagatgtactgcagtggctcatgcttgtaatcccagtgctttgggaggccaagacaggaggattgcttgaggccaggagtttgagaccagcctgggcagcacagtgggaacccccaatccttacaaaaaataaaaaattggctgggtgtggtggtgcttgcctatagtcctacctattcaggaggctgaggctggagactcgcttgagctcaggagttcaagatggcaataagctgtgattgtgccacagcactccagcctgggcaactgagcaagaccctgcaaggaattggctcatggctaggcaattccaaaatccataaggcaggctgccaggaagggcaggctgggactctctagcagaagccgaagctgctgaagctgctgtctataggtagaaattcatgtttatcagggaagccttaattccactcttaagacctttcaactgatattgaatcaatttcacctagattatctaggatactttcccttacttaaaatcaactggttacggactttaacgaaatctacaaaataccttcaataaatatctagattagtgttggattgagtaacaggggactattgcctagcaaagttgacacatgaaaaaaccatcccaggtaacttccacacaaaatcatggccagagaacaatagtaccagagcaagacttttccctcttctttgaattccccatctttgaggctggagggctgcatcactcccccactgctggtttgtgagagctgtatgtagaggaaaacaaaaattagccgggcgtggtggcaggcacctgtaatcccasctactcgggaggctgagacaggaraatcgcttgattctccacccaggaggtggaggctgcagtgagcagagatcgtgggctgcactccagcctgggcaacaaagtgagactctgtctcaaaaaaaaaaaaaaaaattgaaacaaaaaatgaattggttataagaataacattttgatttagattggattaaactttctcagtcaaatgagactgttagagtagcttaaatttattagaagagctaaatgatttgtctgataagttgtccaagggtatggaggctctggttggagaataaagctctttcctgattgcaatatatgaattctgttcattcaataagttggtcatatgtataaagtagacgattgctaaatataacattagttatcaccttcaaagcttatctcttcgcctccgcgtctattctctttgtcctctctcatttgttgtttttgatggctactctatgcttttactgagaatagaagaatgagaaaaccagcttagattgcgtatgtgaaatactagaaagtgagattgtattttccttctctgatgactttacaaatagaatgattaaaaagtatttttytctaataatttgtgtacacagaaacttaggattgacaaaacgatcttatttgttcttgacatatgtataattttatgcttttttaaaaaacttttttttctgttcatggccttttcctctgtttcttcttcctcatgacaccactttaacaactgatgtcttactacacattattctcattatctcattataggatttaactgccctctttcggtcaatgccagtaattgcaccattaatgacagttgctaaagcagtcagtccagtgacttttcagagggtgctgagattacagattctcttccaggattctttgtttgtttagtagccaatcaagggtaaagtctcttctattcaatcactagaggaaaaaccattttctcactaccttgattctagaaaaatttgtgcattcttttgataatactcagacacaaatagttctttagtggccattcaattattccctttgttactgtacatttccaagatagattatttgattagcaaaaatgcctgcgcaatgcattcaggttattgccaggtatggacactactagaatgacagtgagtaagagagaaaaaagaaatgatacctttcagtaagaaggaaaatggaactatcaataatagaaggctaattagtaaagaaaaagtcaagagaagataagactgagaaaaacttcagattcttaataaaaagaaggcactcaattataggaaagtaaactttctgaaaagtaggagagaagtaggatagtggtaaatttgctaccattttgaaatggtccataatcatgaatatataatttcagtatatggcacagactcattacagaatcacacagtgctaagttcctaggccttgtctgtcctcgaacaatagtatataatttaacttctctcgcctcatcttgacagataaataccatgctatccatttttctgtttaagcgccttctgtgttgggctatccaagtcaggaaatctttccttagtattctgtaggacccattaggttgaaatcaggaggtttttcaccatttgatggtttggatctataagaaggacactttcatattgttcaacccaaatatttattgtcctgtcatgaaatagcaatgatatatttggaatgtcagctagcttttctgtccagtgcctccctcccatcttcatctcagatattaaattttactaaaacttacttttatttagaatgtaattcttctgaatcactttcagactttctgtttttatatgtggttgtgtggtctgtgacatcacaggacattttctgaaagggtgcctcactattgtctctggggttgttttccaaactattgaaaactattctgcagatcttcatgctcaaaatgttttgatcttacaagaacttatcactgaaagatttcaaacaacaactagaattcagattcctttttcaactgcttattaaacggttcattgattgaaacattgagagattgtagttgttcaatgggaatgtcaatgggaagacaactaagtttatgcatgaagagggaaaggcaagtgaatcacgaccactgcccacctgacagcagctgtgcaaaatgctgtgacagactgtttccaaagatgcacatcactgcgtatcttccaacagacatgccctttaaaaacaactttattgccaggcgtggtggatcatacctgtaatcttagcactttgggaggctgaggcgggtggatcacctgaggccaggagttcaagaccagcctggccaacatggtgaaaccctgtctctactaaaaatacacaattagccaggtgagatggctcatgcctgtaatcccagctacttgggaggctgaggcaggagaatcactcgaacctgggaggcagaggttgcagtaagctgagatcgcgcctctgcagtccagcctggcgaaagcgtgaaactccatctcaaaaacaaacaaacaaaaaaacaaaacaaaaaacttggttgatatgtaattgatgcactataaactgcacctgtttgacatgcgtattttgatgagccacaggattttttgccatgtgtccttgatactgcttctccaagaatttgagtctatttttactattcttgaatccagtccagccctgtgactcacttgaccagcagagtgctgtggagctggtgttgtgtgtcttggagagctaggttatagaagcctggcaacttctactgtctcttggcacatttgcacttgggacccctgacctgccttgtaacaagtgtatctacttgctggagagaccaggtagagaggacctaagtctatttggagagtgagaggtcaagttatcccagcatcctaatcaaatcttcaggtaattccagctctagctatcatctaactgcttgaggtaccccatgcgagaccactcaccttaccccagtcaaccatagaaccatgagaaataagaaaatgataattactttaaactgctaagttttggagtggtttgcgtgcagcaatttatcaccaaaacagagactggtactatgaaaggctgatgattttacaaaaatctaaaatatgtggcattggtttggggaccaggtgatgagaagaatctggaagggactctaagaaattctttgtaaaggctggaaggacaaggaacacattttttattgggagctagaaaaaaggtcgcttgtgtaatgtagtggcaaaaagtttagcaatgcttcagcttgtgataaggtggctaaggaagtatctacctaggatgttgaatataccagctcgtttcttttagctgcatgtgataaggtaaagatggagatgaactaaagaagtaactgctcagttttcaactagaatctagaggcaacacatttctttgccagattttttaggattgaaaacaaaactgtttctcatctccattctcttccagtaaaagattattaaagtaataaattacaacagagcaaaagatcaaattcagggcactgccactaaaagtatggcctcagggtcaagatttcaagattacagctgtagacctttgtgtagacctcagaaagatttaaaataatgcctcctgaaccctctcagctaggcaaaaagtctactaaaaatcccaaggacgtgtttcttagaccttttctgttaaaggcttcttagaaacttaagagcattgttacccagcacttttcttctcagtcaaaggtagagagggacctgtcttatgatttatcagtgtggcttttgtttactggaatggttatagattgatagaaaagaagtccatacagcttttaaaagaattctgctgccttgtactgaaagggagagacagttgaaaataaaaaaataaaaagaggcctctgagtcttcaaacttttatagtcaggaagcagtttgatattgaccagcaaatatgggcaatgtcttatagaaaaggaaagataacttaaaaggaagatcttagaacccagaaagcagagggaagaggaatggagaagcactttgatgattgcaggactgggccctcatggaggaatggcgatgtgttcccagccagaattgctatgatgagtgattgctatgtgcttcctgttctctcaatttttttgaataggaatatttatgcccttatcctttctttgtctcaccatcttttttgggtttgtgtgcatggcagatatctttttttttttttttttgagatggagtcttgctctgttgcccaggctggagtgcagtggtgcactcttggctcactgcaacttctgcctcccagattcaagcaattctccctgcctcagcctcccaagtaactgggattacaggtgcccaccaccacgccggttaatttttgtatttttttagtagagatggggtttcaccatgttggccaggctagtcttgaactcctgacctcaggtgatccacttgccttgggctcccaaagtgttgggattacaggcataagccaccacatccggctgatatcttgtttcttaagttcaaatgtcttcgggttgagatatcttgtctcctgtgctcaaggagtagtacctaaggaagttcacccaaaggactccattcacatctgatttaggtgatgaaatcttagacttatgcttaagaagatgaggcttttgaggaagaggctaagtgcattttgtatgtgggagagagatgaaatttgtggccaaatggcagctcataacaatgtgtgtttccaaaggtggccacaataatatctccaaccacatgctcttttgtaatgtgatcttgctactcctccctcaagaggtgaaatctgtttcactcttcttgaatcctagctgaccttatgatgtacttgactaatcaaatgtaatggaagtaatacatgacttctgcggccaattcaaagaaatcttgcagcttcttcctatagtttttgaagctcttgttcttgggagctctgaaatgccatgtaacaagccaagctactctgttggagagaccataaaatgaagtcctgagactacatgcagggagagagagaacaagcagtctctcagaatcccagtggagtctccacgtgactccaatcccagctgccatctggctgcaatttcatgagagactcttggcaagaccatgagaaaaatcatccaggtaagccatgtcaacccatgaaactgtgaaatatatgaaattgttgttttaagcaaattagattttggggtggttttttatacagtaacagataaatgaagcagatattaatttattgtaatatgtgtcccaatttcaaggatcttaaaatgtaaacaaagtacaacttagaattgatgaaatagaaaaaaagaaacgcatgcaaattatatgaataggtaatttgtagaaaaagaaatcccaatggctagtatgaagagacgctttactcctctagtaatcaaagaaggaaaagtttaaacaatcaaaaaataagaatttttactcaaaaaaagtacaaacaggcttggcgtggtggctcacacctgtaattccaacactttgggaggccgagacaggtggatcacttgaggtcaggagtttgccaccagcctgaccaacatggtgagaaaccctgtctctactaaaaatacaaaaatgagccaggcgtggtggcgtgcacctatagtcccagctacctgggaggctgaggcaggagaactgcttgaacccaggaggcagaggttgcagtgagccgagatcaccctattgcactccagcctgggcaacagagtgagattccatttcaaaaaacaaaaaaaaaaccccaaacaattagaaacctagatagtggtaaatattggcaagaacacaggggaaatgagacctccttgtatactactagagggagtatagatttgtgtagcattctggttgaatagtaaatttaagttagtatatatcattttattcaacaattcttatcctggctttataacccagagtaattatcacataggctgataaattgacatgtattaggatattcagagcattgctgtatacagtagaagtatcataaatatctgtcactaaaggagtgaataaaattttggtggctgcaaattattttagtggaatactatacagaagttagaagcatgacacaaaacatgcaaatagcaacacagaaagaggctgaaaagtattgaaggacttctggtttctggcatgacttataaagagcttggaagtcaccactgccaccctcacaacaaggaaaaaaaactgaaatactgaaaatcaacaacttttcttagatccatcaaagaattgaggtaacgggcaaaccatcactcagaaaactgagagagagaaccacagttttgcgagagaagataccacagctgtcatcggacctgtgaggcttagatcctatttaagaagtctttagagaagcccaaagacaaaaatgacgacagaggaaattttagcctctaataaagacacagagagagtaaacacagccgaactcctagatagataaacataaaacctcatgataacttacttcagtttcttttacccaatatataataatctagatttctacaaaaaattacacagcactttaaaaggcaaaaaacacattttgaagaggccaagcaagtacaacaagatgaagatatgacagtgattttggaattaacaggctggaaatttaaaataatgattattatgctaagggatctaatagaaaaagtggacaacatgcaagaagagatgggaaatatcagcagagagactgaaactctaagaaagagaaagaaagaaatgctagga

SEQ ID NO: 6916 - DNA, 14096 bp, Homo sapiens
ctgtcatattcagagaatgatataatgtgtcatggccaagataaatgagaataaaatctaccacagaaacagatcaaaatggaaaagacagatatttccatataccttgaaaaggcatttaataaaattcagcaatcatgcttgatttaaaaaactaaaatttcttaacaaaacatgtgaatgaaatacttcctttaaataacaatgtatgtgtatcccaactcaacagccagctcaaatgagaaggccagacacaatgcaaagatgcaaagacaagcatatccatcattacctttgttaatataaagctgatataaaacaaacttttaaaaaaaatctgtgatatatatgatatacaattaatttcctgaatgtataaagaacccttcacactgacaataaaaagaccaacaatctaacagtaaaacgggcaaaggactgaacaggcagttctcaggaaagataaatacaagggttgctgaaaatgttgaaacatgctaaatcacactcctgataagagaaaggcaaattaaaattataataaaatattttcacctctcagatttgcaaggatcaaagcatataagacactgctgacaagctataaaagtggcactcatatgttgtcattaggagtgtaaacatgtattatctttatgaatagcggaaatacccaccaaatttggtggatttaaaaattttaacctttaacaattcttataggaatttattctatagatttacttgtacacaagagaattgatgtgtatgaggataatcactgcaacattgttcagagtcattatgtccactaaagataactgattacataaattataggacatccataaagtggaacactatgcaggcatcaaaaagaaagataagctggcatggtgatgcacgcctgtaatcccagtactttaggaaactgaggcaagaggattgcttgaggccacgagttccagaccagcctgggcaaaatagcgagatctcatctctacaaaaaaaaatttaaaaataaataaataaaattaaaaataaaaaaatttagccaggtgtggtagcatgctcctgtggtcccagctactcaggaggctgaggcaggaggatcacttgagccaggaggtcaaggttgcagtgagccatgatcacaccactgtacttcagcctaggaaacagtgagactctgtctccaaaagaaagaaagaaagagagagaggagagagagagagaagctctaaacaatatagttatgtcaaatgacttctaagacataaatgccaaagtaacaggcaaaagagtgtgctaccatgtgcttaaagaattcatggatactctcacaaagtatacatcacacctacaaatctccacaagaaactgacacagggatgcctctggggaggggaactgagtgatgagaaaggtatgtgaaggagactgcataccatttgaaccatctgaatgtggtaccataagcatgtctaacaactaacagaaagggaaatatacacacacaaaaaaaaacataaaatactgactggttgtgaagtctttgtagaaagatttactagtcctctaagcagatgaaagaaatattaggggaaacattgcttgttttcattacatccaagttttaaacattctatttcaaataacaaccaaaattaaaacagaaagaacaaagaataaagaagactgagtgacttttgttactatataaagaatctacacaagaatttaggggggaaatgttaaacacagtaagaataaaaggaattacttcaaaagcatcccacccacaaccagcaaagacctaggttaagcaagactatgtattactggtattttacatgaaatacagttataaacattctcctgaagaggatagaggcaaaatgacaattagagttttagaagaaaaaatactggcaggataaatattttaggtgagagaaatattcaggcttagagatttagaaatgaactatggcacagagaaagtgacatacaaaaacatatacaaagtatacacagaaaaaaatgagagccaagagcaaaggacagtagaaaagacaaataaaagaagatccctaagaaaaggaaagaaaatgcttccccaacaatgtgtttgccaaaaatcgcaattacctgagagctaaaaaaccatgcttatgtttggaatctgcaactaccaccaggaagtggtatatagtgagttagcaagcttccatgagagagtgggtaaggaatggaaaatgaacatgggccagacgtggtggctcacacctgtaatcccagcactttgagaggccaaggtggaaggaccacttgaggccaggagttcgagaccagccgtgactaatatagcgacactccatctctacataaaataaaaatttaaaaattagccaagcattgtggtggacgcctgtagtcccagctactcctactcaggggcctgaggcaggaggacggcttgagtccagactttgaggttgcagtgagctacaattacactccagcctgggcgacagggcgagactgtctcaaaaaatataaaaaaaagaaagaaagaaaatggaacagaagtagaaagaaacaaaagatacctggtgaatgcctggaaagagagagagaaaaatcacataaagagcttgaggatttcagaaggctgggagatggcacagatgggcctgaggccctcaggaaggcagcagccctcccaagtgcagaaagactggggagaaaagcggccagccacttgacaggaggatgacatcaaaagaggaaaccagtgcctttctgcaccaacagggcactcaaagatgagcttccactcaggaacccccgtactgctccgtgtgctcagcttctgctgggatgttccccacccactcacctgcatgtgtgcctgatggagcctctcgcacctcagtccagggctctgccccttgctccaactgagtaattagttttggtttggaagagagaagccctgttcataaagaaaaaggatcttagaggaagaaaaaaaaaatgaatgaaaaggaatgtgatggcggttacaagcacaagcagtcactccagacctcagtgtcaacttgagcatctgcaatgagcatggacaggtcagagaggcctagagggtggcacccaggatgtccaactcatgaagtaaagcaaagggagggggcaaagtcaactagaaaaccaggtcctcctggaggacgagaaactcctattttgggaggcagatgaatcatgacacagaaacattccagaactgggctagttggcaccacaaagctacccatcttaactctgtatggctctgacctttcttgaggggtgtaaggggcataaactccagcctctaagcccatacttaagaaaaacaaaacaaaaagcacatcatttaagattttttcaataccccaaaccattcaccctgtgaaaacacaaagttgcccagcagaccaatcctgagtcaaggagaaagccatcctcacccacagacaccagattcccatagttctccagcatcacatccctgtacagggcccgctgagcagcatccaggtgtctccactcaatccgggtaaaggccacagccacatccccaaatgtcagcggtccctgcaaaaccaaacccaattctgctcatccgggaacccctgagggaggcatcccaagagaaggaagcaaggtggtcaaagccagcttctgacagttccaacagtgctcatggaaaccaacaagtaaaagctgagggctgaggggatgtgcgactcctcccttgagcaggttcttcctgcatgcctgtcctgctccctcctccaggcctagcctctgctcactccacccttcatgtcacctcatcaaaaaggtcttctatttctccaccccatcctctgccactcagtctcgaaacccatttcacttttcttcacaggatttctcaccacctggcaggagaggtttgcactgactgtcagcatcctctctaatgtgagctccagggggacagtgtgggtcactgctgcctcccagtcaaaaacactgcctgacacagaagtgttcaggctttattcaatcaacaaatgaatagaaactttgaaaagacatggaaagtgattagctttatccgagaatttacagggagtatgatctgactctggggcagaatatttttaaaaaagaaaaaaaaattgcttttcataagagtaacaacttactatgtaccagccacggtgctaaaccctgagatacatatcatctctctaaatttctgccgtaactatataaagtaaaatctatttcgtagctaaagacacaaaggttcagagagttggaagaacttgctcaaggtcccagggctggttgaaggcacagtataaaaggaagccacaaaaagtggtaatgaaactagaacaaattggaatggctatgaaatactaaaagaaaaaatgagtaagccttaaaaaaatgaaaagtgtgtttcaaatgaaattacttgacttagagcagtagaaatgtaggtgatctttaatttttttaattttatttgtataatagacactcaaatgtttatcacttcctttcaaaataccaattatttaatcagcttctcaaaatccttcaaaacctagttttctccaggataaaagcaaactccagtctgggattctagaccatgaatgtttccaactttctcagaccagtttgttcatggtcccgccataatgacttcattcaggcagcgctttcccctagtatcctctgcaattatgcaaatctcatttattcttcaggaagaactaaggcgcccactactccacccctcccaccctaccacacactaaaggtcaagagagcactgctatcaccctatgtctttatggcctacgtctttacatgctaacgtgtatttttttcatcgtctgccagtttgcaaagcacttttctgtttctagcactctagaaaacatgggtagcaataatctacttggtgaatgactacgtaatgggtagacaggacggaaatcgcgggacccatccaggattggttcgggtagctttgtccacacacagggcagggcattgtccgggcaagaggcataaaccccacctcgctgaaacacgtggtttctcaagaaatggaaaaatcaaacttgcctggatctgggctcttggggccatctgtctcctgaactgttctcccaggcaagggctgagaatcctgcgtaagtcaatctgggaaagaagagaggaaattgaggaagtccctccgtgccctagcctagctagaatctgccctctagaccaggtccccgcccgcccgttccctccacaggtgggcagacaggtccaggtgggtacgctcgggaagaaaggaaagggaacggctgctgggatccggcctggactgcagccagctccacgccaaacacttttggcagcaccgggggacggccttgtcagtggcccaatctgtcggccggggcgcaaggctggagcgctctgtgatgcaccagcctcgagcggtcgctccacacggcgcagccactgcgggtgggcactgcccaccgccgccttcccctcccaccccggctcgcccctcgacccgcccctgggaaaggcggggagcacccgccaggggctcgaggcttcagggacccagcctgaccccggccgctcacgaaccgaaccgagccggcagggctgcggagctgcacgcccagagagtcagcgaccacaccacgccgttcggacagtaaccaccagccaggggctggtgcagcgctcgcaccacgcggagacaggctggaccggaagcggaagtggctgaggccgcggaggcctctgggaaacgtagtctgggccgcttggggtcttaggggctccatccgcagagcaggttggcatcacctgggaatctttgaaaagtgaaggtgcgggaagtggagagcggctgatcgcagtcgggaggtgatacattatgactgacatgcaaaatctggtaaaaaattggacagggcagtgggccgcctggaggcagtatcccatacctctgacatgcaccgtggatatggagatagtccttcaaaagcaggagcagctccayatgcgcaggcatttgactcgctgcttgcctgccctgtggcagagtacttgaagatcagtaaagagattggggaagacgtgcagaaagatgtggagatggtacacacagttttgaagttggagtgagctctcttggttacagcttctcagtgtcaatagccggcaggtaataagctttccgatytgttggcacctatctcagagcagatcaaagaagtgataaccttttgggagaagaaccgaggcagcaagttgtttaatcagctgtcagctgtcagtgaaagtatccaggccctaggctgggtggctatggctcccaatcctggcccttatgtgaaagaaatgaatcatgctgctgtgttttatacaaactgagtccttaaagagtacaaagatgtggataagaagcatgtagactgagtcaaagcttatttaagtatatgcacagagctgcaggcttacattaaggagttccataccaccggactgcctggagcaaaacggggcctgtgacaaaagaactgagtggactgccatctggaccctctgctggatcagctactcctcccccaccaccaggcccccctcctccactagtctctgtcagttcaggctcagatgagtccgcttccctctcagcactgtttgcgcagattaatcagggggagagcatcacacatgccctgaaacgtgtatctgatgacatgaagactcacaagaaccctaccctgaaggctcagagtggtccagtacgcagtggccccaagccattctctgcacctaaaccccaaaccagccacaaagaaggagccagctgtacttgaactggagggcaagaagtggagagtggaaaatcaggaaaatgtttccaatctggtgattgatgacacagagctgaaacaggcggcttacatatacaagtgtgtcaacacgatgttgcaaatcaagggcaaaattaactccattacagtagataattgtaagaaacttggtctggtattcgatgatatggtgggcattgtggagataatcaacagtagggatgtcaaagttcaggtgatgagtaaagtgccaaccatttccatcaacaaaacagatggctgccatgcttacctgagcaagaattccctggattgtgaaatagccagtgccaaatcttctgagatgaatgtcctcattcctacagaaggcggtgactttaatgaattcccagttcctgagcagttcaagaccctctggaatgggcagaagtttgtcgccacagtgacagaaattgctggataagcgaagtgccactgggttctttgccctcccttcacaccatgggataaatctgtatcaagacggttcttttctagatttcctctacctttctgctcttaaaactgcttctctgctctgaaaagcacagctacctgccttcactgaaatatacctcagatgtgcagtgggatagcaggtcagttgatcttctgcaggaaggtgcagcttttccaaatcagctcaactgccgacgaggactaatgatgcattttagctttgagctttgggggttattctaccaacaaacagtccactgggaagaaaacagtcccaggaattaacagatcagaacgttcacactggttaatctttttctgacaatgagcatgaaggtagcagaagctggtgtgtttccagatggttcttctaaccaaactaatttttcactattgacaagtgaggcaaggattgcactggaccaaaggctgaggcttggccatctagcattccacgcaaaattgtttcctataagcattccttttattcactattctatcctgggtctgcctcaaccatgagataggagagtctccrgtactagctgytgtagcagtgcccttcatccagggcagttaaaggagtattcracccttkctttctctgggatccctgcccagcaccttcctacagagatgaaaaaaaaaaaaaggaaaaacaacactccattccaaggagtctggtattcctgaatcctccttccctgctaggtgcctgtcacctgtcttcactgcctccttttccctgtcacactcaccagcttatggcttctgtccaagcacctgaacaggggaccaaaacctccactgcaagctgcttttaggtcttgatttatgtaagaatcttgcacagcactgctaatgtaaatttcagttttttccctctaggacaaacacttaccaaaatacgcaacttttttggtgggaagagagattgtcctgtgatttctacccatttcctgatcctgtggaaataaatctttatgtacttaaagttatacagaaaatagaatgaaataaataccaaaaaaaaaaaaaagcaaagtgaaggtacctgggtcccagcttcagagattctgaattaattgccctaagtgtggtcctggcattcggattttttaaagcccccaagtggttctaatgtactgcttaggttgacatctgccaccagaaactgatacggaaagtatgagagacatattttatgtgcctttggatagctatttgtttccaaataatcctgtttttatttcatacaaataaaaagcatgttagaaaagtacatcacctagaacactaaaaacattatttcctcactatttgctgacatagaaaatgaaagtaggttgaatctgttttaacaaatgtattattttctaggaaaaacatatgtttctatttattaactccaggaattggaaagctaagggaggaaaatgtatctctctcattcaattagggcctttttttttaagaaaatttctcaggatggtgcattcatttaccaatttaccagtgattgaccaaaggcccactgcgtgctactcacttctggatgctaaggatagaacagctgacaagcgtccctcctagactaaagtggagtcaggctcctttgcatcctcctttcaactatgccttgtcttggcctggtgagccgagttttagccaagaatcctacaaagccactttatcaagaatcatggccaggcatggtggttcacacctgtaatcctaggactttgggaggctgaggcgggcggattgcctgagctcaggagttcgagaccagcctgggcaacacagtgaaaccccgtctctactaaaatacaaaagaaattagctaggcgtgacagcgtgcgcctatagttccagctactcaggaggctgagacaggagaattgctggaacctgggaggtggaggttgcagtgagctgacatcgcgccactgcattccatcctaggtgacagagtgagactctacaaaaaacaaaagaatcacactttttccatcacactttttccatcccactttttccagcaagggcacctaaggaccagtctttccttactttgggggctggatccagaatctgcatttatttatatatggctaccatttgctgattccagaggacatgcagagccttttacatacatcattacactgagctctcaccaccaaagaaggtacaattattattctcattttgcagatgaggaaattggctcagagaacgtaacttgtctttggtccctcacctagtaaatagcagagctgggtaccaacagtcattgttggatcccaaagcaaagttgcccccattggctttccatcatccctcgactgtctgaactccttgcctaacctgctgggccctccaccctttcctgcctgctttgccatcctcacctctccctcggccagagctcatgtggctctgccccagcggcttccttagccccttgctcaccaagcttcacaccacctagggagctggacccatgcaggagctgccctgggctcttccttctgcttgcctaacttgggcccccactcttgtcctggccaactcctctccatccttcctatctgaactaaaatatcaatttcacttctgtggcccaagactaagagacatcctctcttagtacactccactataagtgctcctgtgtggggcttgaacaaagtgtcaattgccagtggacagatgtaggcagagcctgcaggagttacgtcaatcatttgaaaagaacattatttactgataatagagattaaggactcaaaatggggtgttgggagcaagccccccaaaatccggccataaactggccccaaaactggccataaacaaaatctctgcagcactgtaacatgttcataatggccctaatgcccacactggaaggttgtgggtttacgggaatgaggacaaggaacacctggcccgcccagggcagaaaacagcttaaaggcattcttaagccacaaacaatagcatgagcgacctgtgccttaggacatgctcctgctgcagttaactagggcaacctgttcctttaattcggcccatcccttcgtttcccataagggatacttttagttaatttaacatctatagaaacaatgctaatgactggtttgctgctaataaatatgtgggtaaatctctgttcggggctctcagctctgaaggctgtgagacccctgatttcccacttcacacctctatatttctgtatgtgtgtctttaattcctctagcgccactgggttagggtctccccagccgagctggtctcagcaatggggagttcacggtttcaatcactaccagctaaaacttacaaagagacaggctctgtgctaaatgcttaacttcctcacttctttagccagttggcaatgtgaaggggatggtgtaatctgtccccatttttcagatgaactcaaggccaagtggagatgtggtgctccagccagtgggcagcaccaaggctggcaagaggctgggccaggatgaagtttggacctttccctgcaggcaatgggaagccttggaaggttttatacaggataagacaggaacaggcctttttctgaaaagaccacccttggggggcctggggtagtgagaactttaagggaagggactcacagccagaaaggtaaggagcacattgtgagcacatccagtgacccagtgagtacccttccatgggctcatcctaaagagataatcagcctagtgtccaaaggtgtgtgtgtgtgagaacaccaattaacaaggagtatagttgtgcaccatcacccccagctaatttttttacttttttgagacagagtctcactccatcacccaggctggagtgcagtgaccaagccaaggattcgccatcagactgtacctgtcttacctgtacaaactagataaattcctctcttctctaggtctcaaaatatattgaggttcctgtgcctgtcagaaactgatatccttttttttttttttttaaattggagtcttgctctgtcacccaggctggagtgcagtggtgcaatctcagctcactgcaacctccgcctcccgggttcaagcaattctatgactcagcctccagagtagctgggattacaggttcctgccaccatgcttggctaatttttttgtatttttagtagagacagggtttcaccatcttggccaggctggtcttaaactgctgaccttgtgatccacctgcctcagcctctgaaagtgctgggattacaagcatgagccaccatatgtggccagaaactgatattcttttcttaccacaagatcaggaactttataagggaactgtgtagacaaggtaccaggccagtcattccccatgtctatcggctttataagtcaacttcagttatttaaagcagtctggtcatatcagaaaatatgtcattccagtcaaatggtggtttaaaaaagaaaacagtgtctccacttgcgtcctgtttaaaaaaaatggattcttactgagcttatgcaaataactatattgccaaaatgtaagaatacgcacaaatagtttctgaattctggagaaatcaggtagagagaaaggtaaatgtctcaatctgctcccaaaagtatattttaggctgggtgcagtggctcatgcctgtaatcccagcactttgggaagccaaggagggcagatcacttgaggtcaggagttcgagaccagcctggccaacatggtgaaaccccactgataaaaatacaaaaattagctgggcatggcggcagtcacctgtaatgccagctacttgggaggctgaggcaggagaatcacttgaacccaggaggcagaggttgcagtgagccgagatcacaccattgtactccagcctgggcaacaagagcaaaactctgtttcaaaaaaaaaaaaaaaaaacagtatattttacccaatttctgtgacttacaagtagctcaaaagaaataaagttttcttgattccgcaaaacaaaacatgaaaagaatcagcaatgtttcaaacaaatagacataaaaatcatttcactcctccatcagttcagtcccatgtaattaattcttgttctgcttgatgttgagttagtgatatggtttgaatctgtgtcccaaatcgcatgtcaagttgtaatcccagtgttggaggtggggcctggtgggaggtgattgggttgtggggacagatttcccctttggtgctattctcatgagagtgagtgagttctcatgagatccggttgtttaaaagtgtgtagcacctcctctctctctcttcctcctgctctggccatgtaagataagcctgcttcccctctgccatgattgaaggtttcttgaggcctccccagccatgcttcctgtacagcctgcagaacccttgagccaattaaacctcttttctttataaattatactttctttcaggtattctttatagcagtgcaagaatggactaacacaattagtgatcttcacgaacacaccagttttttattagtgttctgtaagtttttacttagtctaatgatatgatctacaaagcagtcagaaacctctattcaagagtataattcctggttctttccatgaatatccttgaagacataacactctaggatttgcacagagctaaaagctctatgcagaaaagcatcagattaaagcaattcactacatgtaccaagatatatcaactttttagaaacctcatacaattttgaaataatattcgtaacatatttatggtgttgggctctttgcaggctttcacaggctgagcctctgtgcagtcataatgctgcatggaagccacatcatcacttgcatggcccctccagccagccgggcacctgagatgagaactgcacccaacccagcaccacagctcagcccccagcagcagccccaccctctgcaactggcttttgtgctgctgcaccttggtagctagctctgatggcccaaatggcaaccactgcagctggcattgctacaggctctactgtggggcacacactgggggctttagtggaagaaataatgctgagcctccaaggcctggcctcacttaccaagaacctcagggaacccggccagcacagcagcagcagccttgcttctgagatgaaacagtttttggagcgtggccagaaccaggatgacataaagctctgtgaggtctcaatgaggtgctgaaacagtgcagatttgcaaatggaatagcctaatcaagaagtccaaactgaagaaatgaaaatggctctcatgaccaagttaatttagcataaaatataattgacagtaaaggtataaagtataaaaccatcagttaaaattctcctctgtcattcatatctttcctgcttcagaattacaatggaagagggtgttctcaatgtgtagaatttcaccgagatggtatagaattttgggctggacaaatatttctgtggtttccttaaacgagctgttgtaattttattgtttgagcgttaattagaataaagtgattttctcaccacccccccacccaaaacaaaattaatataggcatgctggctcacatctgcaatcctagcactttgggagttcaaagctgagg

SEQ ID NO: 6917 - DNA, 13331 bp, Homo sapiens
aagccatctgttgaaactcttctggcctgcttgttcaatgacctgggaatccacctaacctaatattgtcatccaacccatctttcactagctttatccacaagattatcttggcaagaattgttgcaaggccaattgtttcctcttaattattttcttccaaactacatctttattacctaaaactgctctcctctagctgcccagtttgttctatgtgacctcacccctcctgatgctcagctgattagaccacaggagacagcctcatgccagaagagccacctgtcacaggctggacccaaccaggagctcttttctgtggaatttggaaacagcacattaaactctttagttctctgaaatgagaagtggtatgaagctagggctggggtagccacagacagccaacgtgcagaggaagtcagagtacccagaagaaaacagatcagacaccgcaagagccataaggtccgagaaagacacatactcccaactagccattaaatacttttgatgaactcaggaaaacatctgtccaccttcaggtctgtgccccatgtccccttttccctgacttctcttgaggtcgccagcagaggctgtagaagacctctgcagacaccttctgggccctgacatggaagttctctggacctgaaaaaacaccgctatagatgatgggaatcccactgtctgaggatcactgatttttgacagtctagagatattcaaggacctgaacaagttcacaaagcttgtaagtaattaaatccaggactgcaatcccaacagtcatagtgagaggtgaagccagctgagcttctgggtcaggtgggtacttggagaacttttgtgtctagctaaaggattgcaaatgcaccaatcagcactctgtaaaactgcaccagtcagcaatctgtgtctagctaaagcattgtaaacgcaccaatcagcactctgtaaaatggaccaatcagcactctgtaaaatggaccaatcaacactctgtaaaatggaccaatcagaaggatgtgggcagggcccagtaaggaaataaaagctggccacccaagccagcaagggcaacctgctcagcagtggcaactggctcgggtccccttccccattgtggaagctttgttcttttgctcttcacaataaatcttgctgctgctcactccttgggtccgcactatctttatgagctgtaacactcagtgtgagtttctgtggcttcattcctgaaatcagcaagaccacgaacccacggggagaaacgaacaactccggaggcgccacctttaagagctgtaacactcactgcaaaggtctgcagctccactccttaagtcagagagatcaccaacccactggaaggaagaaactctggacacatctgaacatctgaaggaacaaactctggacacaccatctgtaagaactgtaacattcactgcgagagtctgcggcttcattcttgaagtgagtgagaccaagaatccaccagaaggaaccaattccagacacaatagcatgttcttcccctaatattactcactgccctcccatgtgaagcaagataaagaacagggtattcaattgactctgctcttcatttggagctgttgttcacagattgtatgtagagtttttttcatttgcagaagacttgaaatgcatcatacttgaaagagaaattggaccattatggggaaagatagtgatttttaaaaatagttactcataatgggtagtttctaaaagttaagttattgaccagcactgggagaaacttaactgattttttacattacaaccccaatttgttaacattagaatgaagggcttttggatagtctagatatttaaaatataaggatatattttgcttagcagctaatttgacagccatttagaaacatttttctttccttttagagaaacaaccagagaaacttcaaagttactttgaacaagctggtaaagacaataaaacagaatagtagggtatgctatgcagggagtacgtctttaatccccagagtcattgttttgaagacttgcaaagttcaaaactgaacagcaacttaaccttagtgtttgttaatgtcagtatgaactcacaaagcctaataaatgctggactcaagtgtaggcatcccagaaagggcagagagcctcccagagtataaggagtagatgaagtctttgcaaaccattcttatcatcaatatttaatcaagccccccaaacaccagattacatccccccccacccccccgccccaccggagttaattctctgcagggcattttttattacatgcaagttagtaaacaatcctaactctcttctctagggtgcgagctccacagagctgctggcaggatctcccactcagactcaagtgctcaggcaagtacacttcttcattcttcattgcctagaacagacctttatgcttatttaataacatctacctatgccttactgtggatgcacgcattgttctacttgcttaatactgattcaatcctctcaataactctgttgagtcaggttctatctcccttttactgatgagaacgctgaggtacacagaaatagaaacttcactgtgaaatggtttaacatgacacagttagggagcagaaaggctgggatttgaaccaagataggctggctccacagtctgcgcttggaactgcaatactctgccacttctcgtagtcaatcatcacttaatcatgtgttaaatcaagttaagaaaagtgacaagaatggaatggagataatatatctttaaggaaatattagcaaactacaaatccactcagaaaaaccaaaacattaacagatttaaagtcagcctaattcagatattgggcatttctgaagaagaaagaaggaaggaagggagggaggaaagcaaggaaaggaaagaaaggaaggaaagggaggaaaggaacgaaggaacgaacaaagggggccaggcacagtagctcctcacaccagcactttgggagtccgaggtgggaagattgcttgagcccaggagtttgagactaacctaggcaacatagtgacacctcatctctatattttaaaaaagaagaagaaatgctactctttaaggcttttttttttttttttttttttttttttttgcgggggaaaagactatttatctatgttactctccagctcaaaatccatccatggctctttgctggcgagttcacattctgagacatgtaagagtccctctgcaatttgcctccagcaagcttccggcacgatctcctgcaggctcaagtactcaggcagacatgatgtcttccgtgtctctctgactgccctgccctgcagcaagggcagccgcactaaaccccaacataccctttcctccagggcctgtgctcctctcccgcctaatcctcacaccaaccttaagaatatcgcaaggacaaaaaaccaaacaccgcatgttctcactcataggtgggaactgaacaatgagaacacatggacacaggaaggggaacatcacacaccggggacagttgtggggtggggcgagggggggagggatagcattaggagatatacctaatgctaaatgacgagttaatgggtgcagcacaccaacatggcacatgtatagatatgtaactaacctgcacgttgtgcacatgtaccctaaaacttaaagtataataataataaaatttaaaaaaaagtggcagagccagcatttgaaaccaggcagtctcactccagcttcactttcctcatcacttctccatcctaaagccttccccggctaccccatcccaaagcgcctctcccacccctcacatcctacatcacttgttttattggtctcattcatctaagggtagctgtttccacccctccaccacccatcccgagacatgtcatctttccaaataaactataaatcacctgaaggtcagtaataaatattttaatatcaatggagggaatgacgtttaaaactgcccactacagaacagaatcagaacatgttactctgaacggatccatctgcagactataaggtcgaatagatcatgtttactgctgtaattggaatatgaagttgtactctaataatatctgaaatttgacatatacccacttgtactcattttataagatgaaaggtatttatgaacaattaaacattaattctgatatccaaaaaaggccatttttaaggagcataacatagcttaacatgaaaagtacatgaaatctacaataaaaattcaatcttaacgtgaaagtttttcttttttttcttggcatctctatctggattctgctaaagataagtcatcagcaagtatctgttaaaggctgttctttgtgttttttttccttaatcagaatttatgaagtcaattttatttaaattaaaaataagaattcttcttaaaacatgtaatatgaaaccaagtcctcaattttttttccttcctcttaatttgtaacagagactctaagaaaataaaatctaaggttaaggaaatttccatcgatatgaagaaaatattttccaaaattaaaataacaagttcctccctggttaacataactgatttaagttgcagatacatggctgcccctgagatcaccttcctccacaagctctgtgaaagggccaaatccacatccttttcagcaatttttgagtcctctatgggactaccttttttatgaaatgctgcacatactaccaatgcttcataaatatttcatgatacattaaccagtcctggaatttcctgcaagactgcacaaaatctttaaaatggtgcactgtaagctgtaaaataatcagatataaaagtaagctatatcaatcccttcattaacaattttttacaagaattttagaaaaagtagtgttactacattttaatctcaggagggagatttgctatttatattactttactaaaaggcttttagaattacacttttttttttatatcagatactattttctcagttggaccagagccttcatattgtactctacaatcaaaaatggcccattgtgggagttgggggaactaattaagttggttaatggatacaaaaataagttggatagaagaaataaattacagtgtttgataatacagtagggtgactatagttataatttgccatatatttcaaaatagctagaagattatttgtaagcttcccaatacaaataaatgatcaatgtgtgaagtgatagatatgctaattaccctaatttgattgttacatgttatatgaatatatcaaaatgtcacttgtaccccagaaatatgtacaatcattatgtatcaattttttaaatggtccagtgtgactcgaaaatagaccagactataaattttaacacctagcagtgtctgatacccagtaaaatatgaataaaatttaattgattgacctaaattgtgcctgaagcttaacatgttcccatatattaaaattaatctcaatgtttctatttccttatctgtaaaataaaagagctagagaccactaagatccctttcagctttaaaagtctgattaacgttttactttacagcaaccctgccttgcgccacccactcccccacctaaccacagtttcaaatttagtcatctgggaaagaacagctcaatagactgaaaacatcgccagggaaaagagaggctaaaatcaaggaatcgaatttccaaactaagcaatgcttcccatgttgagggacccacagtaagataataatatatgggaaaatactttttgaattttcaaaatactgtaaagatggaaggtggtttaatattataaaatgctgggccgggcgtggtagctcacacctgtagtctgagcactttgggaggctgaggtgggtggatcacaaggtcaggagttcaagaccagcctggccaacatggtgaaaccccatctctactaaaaattcaaaaactagaaaagaagatggcaaccgtgtgggatgaggccaagcaagatggaactggggtggaggtgctcaasatgtccacggaggagatcatccagcgcacatggcttctggacagtgagatcaagatcatgaagagttaactgttgagagtcacccatgagctccaagccatgaaggacaagatcaaagagaacagtgagaaaatcaatgtgaacaaaaccctggtgtaccttgtctccaacatcatcgagctcctggatgttgatcccaatgatcaagaggaggatggtccaaatattgacctggactcccagaggaaggacaagtgtgctgtgatcaaaacctctacacgacagacatacttcctacctgtgattggattggtggatgttgaaaagctaaagccaggagacctggtgggtgtgaacaaagactcctatccaatcctggagacactgcccagagtacgactcgcgggtgaaggccacagaggtggatgagagacccacggagcaatacagtgacactgggggcttggacaagcagatccaggaactggtggaggccactgtcttgtcaatgaaccacaaggagaagtttgagaacttgcggatccaacatccaaaaggggtgctggcccccagggacggagaagaccctcctggcctgggcctgtagggcacagactaaggccamcttcctaaagctgactggcccccagctggtgcagatgttcactggagatggtgccaagctagtccgggatgccttcgccctggccaaggagaaagcgccctccatcatcttcactgatgagctggatgccataggcaccaagcactttgacagcgagaagtccggggaccgagaggtgcagaggacgatgctggagcttctgaaccagctggatggcttccagcccaacacccaagttaaggtaattgcagtcacaaaccgggtggacatcctggaccccgccctgctacgctagggcggcctggaccgcaagatcgagtgcctgggccagaatcatgcagatccactcccaaaagatgaacgtcagtcctgacgtgaactgcgagggagctgacccgctgcacagatgacttcaacggggcccagtgcaaggctgtgtctgtggaggcgggtatgatcgcactgcgcaggggtgccacggagctcacccacgaggactacatggaaggcatcctggaggtccaggccaagaagaaagccaacctacagtactacgcctagggcacggcaggccagccccggactcgcggctgaagtgcgcaataaaagatggtttagaggcaaaataaaacaaaacaaaaaaaatacaaaaattagccggccgtagtggcgggcgcctgtaatcccagctgctcgggaggctgaggcaggagaatcgcttgagcccgggaggcggaggttgcaataagccaagatcgcgccattgcactccagcctgggcaacagagcgagactccgtctcaaaaaaaataaaaaataaaactcttcggagtagcattttttcaataacaggaaatgctggagataatcagatgcaattggaaacattatactctcatatacaaaattagagttactctattcaaagcactcccccaccatgtagcttcttaagtcaagataattaagtggtacattagtttcaaaaaaaatttagatgctgaccttactgtttctgcaaaccacaatactctgcttttttggtgctgattatgttgaaaagagaatattatgacattctatggtaataattccaattgcaagattttgatcttcaaggaaagaagtagagcattgttgtggaggcaaagccttgagcttgacgcagtaaaatatgtctgattttttttttagcccagcaaagctcactgaaaagttttacaagtgattggaatctttaaatttagacatttgaaacacttttcacttcgtaatctgccatctactctgaaaggcgtaccactttcctgagctctgctggaccctaaactctaattgctcattttagaaaactaaagataaatctatttaaaaataaaataaaatccagaactccaaaggttttgcttttccattcaggctgatttggtttaacccgcagtgagaattgatcaggaaacgtctgccatcttgtggccaaatataagaacttgctccaagagagtcacccattggtggcttttcctcagcagccgtgggcagctgctcctgcagatggacacctttttatccaggcctctgagcatctccagagcccactcgccaacaagtacaatgtcctcaaaagttaaagttgaaaggacattaaagaattatttgctcaagaaaaacttcggaagaagagaatgtgagagagaagggggaataaatgtgcctctctccctccctggcagccctgagggtctccacaaatctccaggattaaaaaatgggggaactgaagcccagagagaaccagtgactcactcaggaaccccggtctccccctcccactcaagggcgctgtctctgacttcttcatgcatgcttgtcttccagatttcccattgctttttcccatgacctcagactggaaaagccaaatacagacttccacagcttagaaaacacctataaaattcctcgctccatcccaaccggtcactgagcagatttaattggggtgggagggatttaattggggtgggagagatcaagacttccaaataatgagactcaagatcagtgttgtccaacagaactttccgcagtgatggaaacactccctatctgcatgtgccggtatgggagtgactatactcgagtagctactgagcacttgacatgtggcttgtgcagctgagaaactgaatttttagttttatttaactttcatttatttaaatgaaattgccacagctggctaccatactggacagtacatctctaaatcttacattcctaacccagtccagcatgttatgaccttgacaaacaaaaaacgccatccattcattcaaaaagatatgtgttagctgttaataaagaaaactgtgttgctatgatacagtgcacacacaaaaatagaaaatatctgttttcccagcgtacatataattaatcgaggatataaagcatgctgatgcatagaggatgagaacacggagcggggtttttctttgatggggagccacagggctgggttaacagggaacttgcaagtgaaaccgggccttacaagtccagcaggaggagggaacataggtattttagagaaagggaaaggataaggatcagaaaagggacatcagcaggtccactcaggggatgccaagaaacctgatccaattcaaggtgtagtttcatgtaagggaatcatgggagaaaaaaaaactaggaaggtaatttaggaccagtttccaaacacaaaaatgagagaaccagggaggttgtaaccggaataaaagggaagggaccaattaaagaaagattacaatggaggagggacccagactttagaaaagagtcaatgtgccaggctcggtggctcacgcctgtaatcccaacacttttggaggccaaggtaggtggatcatttgaggtcaggagtttaagaccagctggccaacatggtgaaaccccatctctactaaaaatgcaaaaattagcccagcatggtggtgggtacctgtaatcccagctacttgggaggctggggcaggagaatcgtttgaacccagcaggcggaggttgcagtgagcagagatcgcgccactgcacgacagagtaagactccatctcaaaaaaataaaaaaaataaaaaaataagaagaagaaaaagattcaatgttctgtttgagggagagtaagagatgattcaaaattttcacccagggtgaatggaagattgctggcaccatgaatggggcagataccagaataatgtttgaaggttgttgaagttgagattaatgagacagatggatcaccaaagcactttgagaagatgaaaatgaaactggaattcagaagacaggagaaactattggctgaaaccataaaatggaggagaaaatacaggatgaggagagaagaaaaggagaagagacacaagaacagactctgcttccaatggaaagtgactcctttgcagggacagaatgagaacagagtcagagaaggaacacccaaatgagtcataaccctactgcaggggcaggagggacacttctcactatatatgctctgcacctcttaatgagcattctgccttcctacctagactgcacgctgtgcaaagatggagactatgtcttatacattcaatcccaatgcctagaacaatgcaggaggacacaggagggtaatgtaaagcatcccagtagaaagaaggccttagtggctcatgcctgtaatcccagcactttgggaggccgaggcaggcgatcacctgagatcaggagttcaaaaccagcctggacaacatggttgaaaccctgtctctactaaaaatacaaaaattagccaggcatggtggcatgtgcctgtaatcccatctactcaggaggctgaggcaggagaatcacttgaaccctgaggcataggttgcagtgaagcgagatggcaccactgcactccagcctgcgcaacagagcaagacactgcctccaaaaagaaaaaagaaaggcggccttagaaaaaaaggttttgcttggtaacatgtagtcctagactatacactgctctggccccacttaacaaagctcaaaagcaagacccacgtttgtacatgatctagttcagtgagtcccagtcctagcaaatggccagaatcacctttagacagttgacagggcccactctgagattatcaattcaacggcctgagcaactgatagttttcaaactccctgtgtgattctaatcagcagccagagttgggaaccatttattgatgccagagatatagaaggttgctgatccagtttttagagtgccctttaattctccacactactgataccatttttatatgcatgtgtcatatttgcccttttttcagatttcaggacactaacatattaagcacaatccatgtaccaggactcacatacatgatcttaactcttacaatagtcctatgaggtacgtattgttggtacagatgaggcgactatgacctggagtttagttaccaatctaagatcccacaattaatgacagcccaggaaaggtgacctcagaaccctcttgcctgttgctcctctgctgcccactccctgccccagccaagcagaaacccagctgccctgggaagcagatagaaggagcctctaagagatcatgtgagtgacagcagaccagtcagcccgtgggactctgactaaagtccatgatttcccccaggaccacctttactgcgcttccacccaaagatggtccttaaaggttagaagggagacctggcaggccaggcgactgtgaaagtaatgttttcattatccttattcaactctacacaatgtggaacaagttttactaataccttatacttctctgacaaagtaacaatctctctgaatgagaaattcagttatactacaggaattctcctcccatcctatcactttcccaaaaggagcaagactggtcccactgggccaggtgttctccctccttggctgacactttctgggcttcagggaagggagtgcagactgcgcggtcacgcccattttcaaccctcctgcagttctcaagtgaagcggcacagaaggcccgaaaacagccacattcgccagaactgatgtggcgtccgcgggcacaacgctagttgacacaattgtggcttaaaaaacgtagcaagtggacgaacccaccgtgatgccgcctgatgaagcagctgggggaggcttcccttcctcgggagtctgaaaacccaggctcccccagccttgccctgggcgtggccaccttacccgcaggagcacagttcacagatgcacttcgtcttcataggggcgatcctgaggccctgacgtcccctcagagcatcgccagctgcagccgactcctagaccccaaccacctgtcttggggcacgcccaggctcgagggtcttggcaggtgttctgtttactcgaaggaaaatttaagtggcccttttgcaatgtcctgtcgtctgttgccctcctggagctggcctagcgcgaggtagcagcagggggcttgcacgcgcgccagcccgggagacctcaccctgcacgccaccgccccggcctccgcagtccagacttaagcacctggagcggctgactgggccccaggaagctgcggggtccgtgcccaggtagcctctgtgatgtcgccagggccaggaggggcacgcctcaggtggcaattacatcacaagagccgcttgtgaggtcgggaagctcccagcacctcactggcaggcccaggacaggggttccccggtgaaccttagaaaaacctgaaaaaggtggaagtcactagaaagctcctggtgcagtaaacggtcacacgtgcagaaaagctgaaaactccctcaccatcaccttgggtggcatttgctatctctaggatccatggtgccccctcttaggggaatacagccttgacttccaaaaggcttgccttgaacagggtttccagatcttcctgtggaaacctaggcctttggcttcagatgtgtgttagaattgctctcacccacagacctgcgctcttgcgaacacagtggtttaagagcgcccaggccttcactgctcaggtgggttctcaatcacttctccagatgctggtaatgatgccttgaagcaggcgttctcaaattctagttggcatcaggaccacctggcttgatgaaaaccagattgccagaccccacccccagtttctgattcagtgtttctagggtaggccaaagacttgcatttcttacaagctctcaggtaatgctggttctgctgggccacggaccacactttaagaactacagcttttgaggttcctttacaccccctggaatagtgtttcttcagcttacctgatcccgagagcacacccccacccagaagtctcccttgcatcaaaacctctagtccgggaatctagcttcaacaagaagccaggtgattctggtcatgaagcaagttcaaaagacactgctctggccagttgtttggacttaaaacattttgacttcctgcttatgggaaatgggagcttaaagtattgacaatctttatgcttttctttcctatgcttcctaactctttccattcattt

SEQ ID NO: 6918 - DNA, 13741 bp, Homo sapiens
tgatggtgggatcctctctctttttctggagttaattactatccccttggggaatatggaaatgcaaccagcacacaggaagctgctttctctccaggtttgttaaacatgtcctgttgctgtgtaaatagttttctttttttctcccaagatggtatagaaaatacattgtaataatgaagtagggaagtgcttgcaatgaattaagtgaaagaaaaacccaaccaattatgaaggggaatatatggcatgattcccatttgttaagaacaaaaaataagaccaaagaaatatactttggtaaacatggaaaaaaagactgaaatgctattgctcagcatagggtattagtgagttttattttattccttcttctttttatttttacatactatttagaattaacatgcttcattttaaaagtcagaaaaatatttatttttaaaagtattaactttttagtatatggccctgataagtgatggtaagtgctctgaagagatcatagtggagaccgacagcctaccaaaatgcattctctctaataacaggatcgaggctggcccatggctggtctacacttcccagtcttccttgcagctcgatatggccatgtggttacaatagcatgtgagccaaagcgatgtagaccactcagaggctgggcctttatgggcagaggtatgtcttgtcttgtccactccctttccttttttacaggctggatgcagacgacaaggctatatgggacaatggagcaatattcctaaattgctatatgggggagaaccacctgccaacttgaacaactggtgtagactgctctgcagcaaggaagtaaactccatagcagctctgctctgttcatcattgtttcttcagggcctacctgggacctggcacagaggagatgctctgtgtgtgtttgttgattggaactaaacttttacttttctgacatctttgtcacaaagccatgaagaaattacatatccttatgacaatttacttagagtaaataaaatactatttttgtgtaaaatgtgagattgcaacaatatgcttccattgatttctcagtctttggtgctgtagttgtgaaatacattctatccacgtatgctatcaactccaaagtacagcactgcaattttcactttaagcagtcatagtcttttaaagaagttaaaataatgaaaagtacatggtttgtttttatttactcacacatttgctattaatagtgcttttctttttttcctatagatccaagtttccatctggcatcttttcccttcagcttcaaaaactgcctttagaatttcttatattgcaaggatgctggagatgaatgatctcagcttttattcacctgaaatgaatgtattttattctcatttttacagagacattcattggctattgaattattggttaacaatttttgttgttttcctttagcatattaaagatgtctttctattctcttatggcattcactgcttctgataaaacatcagccttaaatagtatttttgtttctctttgggtaatatttttttctttctgactgctttcttgctctctgactgttttaagataatacatttgtttctgatgtttgactatgatgtgctaagtgtgttttttctttgcacttggtgatgcttgagttttactaaatttatcatgtctgcaatttgccgtttttcaataaacctgggaaatttcaaacatcatttctgcaaatgtgcttttctgccctcctctctctctgagaccccatttacacatatattataccatttcatattgtcccaagagcagctgagtttgttttttttcatcaatattttccccctctgtccttcaaattgtataatttttattaataagtctttaagttcattaaccctttttttcctgtggccaccaatttgctgttggtctatcagtaaaatttttacttcagatatacttttcagttctagaatttacatttgaatcttcttgtattttcgatttttttttttttgctgaaatttgcctgcttttttttttaagttcctgaatatatttctgatagctgctttaaagttcctgtgaaataattccaacatctggttcatcttggggtctatttctattgacagttttttatttcttgttatgggttacattcttttgctttttcagatttctactaattttaactctatgctagatagcatggatgttaaattgaaaggaggctgcattaagttttcttcctttaaagcatcttgagttttgttctggttggcagttaaattccttggctgcagtggctcacacctgtaatctcagcactttgggaggctgaggtgatgggatcgcttgagctcattagtttgagaccagcctggccaacacggtgaaacagtgtctctattaaaagcacaaaaaatcagctgggcatggtggcacgtgtttataatcccagctacttgggaggctgaggcatgagaattgcttgaagccaggaggtggaggttgcagtgagccgagatcaccccactgccctccagcctggaggacagagccagactgtctcaaaaaaaattactggaatatccttttaattctgtcagtcttgcttcttttattctttgtttggttgtattagggtcctccagagagacagaaccaattggatatacatatatatatatatatatatatatgtatatgtgtgtatatatctatatatatacatgcctgctcttgtttgtttatttctttatgtattacaaggaattggctcatatgattatagaggatgagaagtcttaagatcttcagtcaacaaactggagacccagaagagccaatggtgtaaggtccagtctgagttcaaaggcctgagaatcagaagagccagtgttgtaagtgttccagtccaagggcaggagatgactgatgttccatctcaaggagtcaagcagccaaagtgtcctcttactcagccttctgttctattcaggtcttcaaccgattggaaaccacccatgcatattagggagaacagtctgcttgactcagcctactgattcgaatgttcatctcatccaaaaataccctcacagacatgcccagaataatgtctcgccaaatgtttgggcacctcatggcccagtcaagttaactcataaaagtaacttatcacatggagctattttatttcaattttgaacttgttccaactttatggcttttattctaggctgtggttcttacttcttcagtgtggagtctgagcttcagagttttatggttttaaatttcctctcatcattaccttcatgtttagcctgcaggaggactcctctgattggtgtttcaagtttggtctgcggattggggaggaaggaatacaagagggcagctctgagcttggtggggtgagggctctgaggtgtaaagtgaagtcccacaatgctcagcaaggtctctccacactccatgggatgcgactgcaacattccaagcactgcacattctctgttacctccttcagtgctcggccttgggtcagttgacctctgctgggtctcttggagtctcaccctgtgcacacataggaatccttggccaagggcacacacaatgagttcccacaaggcacactctcctcaggaacctgccctgaacataccagagccttcagcagctttgaactctgacttaaaccttttcagttcagggagactactgtctctggggccccacctgcctgcatcatagcagaaaaagcatcactagaaaaaactccagggcaattgtggggctcaccttgtgtgttttccttatctcaaggatcacagtcttgctattcaatgcctgaaaacaattatcttgtgtatttgaactattctatagttgctttcaatgggagggtatgtcctataccagttacaccaccataactgggtgcagaagtaaaactgccattttggggcaattgtttaaaaatcagagaatcttacattgccctttaacaaaaatacacatttacattagcagttcatagttgccctggctgcttcagtgtcttagctttggcaactctctcactaataatagcttgcatttgcacagcccttttcagtatttaaaaactctcttggccgggtgcgctggcttacgcctgtaatcccagcactctgggaggccgagatgggcggatcacgaggtcgggagatcgagaccatcctgtctaacacggtgaaaccccgtctctactaaaaatacaaaaaattagccaggcgaggtggtgggcgcctgtagtcccagctactcaggaggctgaggcaggagaatggcgtgaaccccggggggcggagcctgcagtgagccgagatcgcgtcactgcactccagcctgggcgacagcgagactccgtctcaaaaaaaaaaaacctctcttgcaaatattatttgatttgttccttctaacaaggcattcattcattctgcaaataagatgtcaattatctcagttaagatagtgagaatttcaaccttgagtttctagctctgaatttagtgctctttacctgcctgctgctggctacccggcaaggtgctggggtgggtagaaggtaggagacctgggtgcaggtgggccctccagcagactttgcgagatcccactatgacagactctccgcgcttcctctgggcattcacaggcatggggtcctggcctgtcccatgctggccacccttcctgcctctgtggaagttcctctgtctaatccgctcttaccataggcctctgatttcaggcaatatcttcttgtagattttatttatgatttcattggtgacaatgacgaggggttttcatcatatacaacaaacacttcactgcaaattctctaaggttttctctttcccttggctggcactgcatgtatcctttcaatttctcttttcttttcttttttttcttttttttttttttgagacggagcttcgctcttgctgtccagactggagtgcagctggatagatctcctattttggctgctgtctactgacaagtttgcactggtggaggttgaggttttgtgacaaatgttattttcctctttaaaccaatcttggagctttactccatgtcataacaagtgatgttgttgctgcctctcagtcagtcatgcatggtccactggttttgtgagctagagacaagcgatgagctgcactgaggatcaaggatcaggcattagcgctaacaagtgcccttgctctttggcaaaattctccttttacagagcacaagcaggattgtgtgtgaatggacatgcttgtttgtactgtggagatgacgttatggataggtgacatggataattcagcctagtttatatactcagaggaatgagaatttggagtctgagtttcagagacttccattctatggttttagatgtcctctcatccttgcctcagtgttggccgcaggaggactcccctcattggtggttcaagttctatctgaggatgggggaggaagaaatccaagtgggcaactctgagcttggtggggtgagggctgcccaacccatgccatgtccaggggtgcacttaaacacacctctgattagattcacctaacaccatcattgttctcattttgccagaggcccagagaggagaggtgtgcaccagtggtcacacggctagtgaagaggggacacagaatccagacctactcttctagggctgggctgtactttccattttgtccttggccccaaccagcaccgcttgaccacggaggctgcacagccagccccaaggggccttgctgcagaacccaagtcacccgccagaactccagcagctccgtggtcggctggagagtgggcagagtcaggcatctgccggctctccacttctgctttctccaggaaatgagcagagacccagctccagtgattcagagtgaaacggcgctgaggactgacgatgtggggccgggtcctcttccccygagcctgaggggctgcagctggggatagggggcccatgccttctgatgtctacaggcgctgacggccacccctccaggtaggccaccttgctcttggcccagccaggccagcctagaggtgggcatatgggcgccgcctgtcagcgtggggcctactggctgcctcctgggaggctgactatggggcacatgtgacccagtgcctggtttgggtttgtgaatgtgggagaggaggtgagctggggagcaggaagtgtgtgtggcgtggggggcccatgtggtcagggccactccagggcctgggtctgcctgagtgtgtgtcactgctgaagtttgggagtcaggctgggctccagcagcactcctcgacctctgacggtaggtcaagtcctttctcggggtcctgctatgaagggaaccctgggaagggctgacacgggctttcctggttgtcgagggggcggagagagcaggccgacaggacagtgaggctcgccctccaagctccctcataggcctctgaggagtgcagagttggagggccatttccaacgggcctcagagggagctggtctatcccggccctgtcattactccactgggttctggtaagtaggtgcctccctgggctcacttccctcatctgaattattacagcaaaccattgaaacgcctgcattttctgcctaagcagggccacctgctcagtaaggactgattcttcttttcccctgaaatgaaacttctagaacactaaaccgatcctttgtcccaactcatctaaagtgtgggggggctggtttgataactaagggctctatgcattaccctttccatggagcacactaattttaatatgagtttatgtatagtcattcatttagttatttaacaaataggtattgagaaaccacgccctgccaggctctggtcaaagcggacaggggtctacggtgctcagcaggtgggagaatagcaggtagggtgggggtcttgggagggtggggatggctctagtcttctgagaggggacctgtgagggaggccgagtcctgtgggtttctgagaagtgttcttgataagggtctggaggaggagacctcgtggaggttggtgtggcagagccgggtaaggggcatgcctggggttctggccagagaggtagggaacagggtcaggtcagggaggcccttcctgtctgtccatcctgagcacatgggctattctttcatgaacttggaaagattttctgtgttgaaagaaaagaaaatttcggccaggcgcagtggttcacgcctgtaatctcagcactttgggaggctgagaggggcagatcacctgaggtcaggagttcaagaccagtctggacaacacgatgaaactccatctccaaaaaaaaaaaaaaaaaagaaggaaagaaaagaaaatttagaaagaccataataagatagaagtaataaaaacagcataaaccctgtgtgctgacaccttagatttttttaaagatcagcatcatctctgaggtcctcttcatgcccatctttcaccttccctcttcagaagcagcaacagtccagaattttgggtttattgttcccttgcttctttttctaattttacatcccatatttaaatcgctatatatgtatgattgcaagttgttgaactctgtaaacatggaattaaatattcttttaaaatttgcctaattggttcaaaagtttgtttctgaaatttcttcatattgttgcatgtacctgtagataattaaagttttctgcagtacagtattctattagatgagtgtacctcaatatatttatctgagatgctgttgatggcattttaggtatttcaagagtttatttttttttctattataagcagtgccgctagaactatttttgtacatgcatcttggggcatgtgtgcaagaatttatcttgggtatatactctagaaatagaattggtgggtcataggttgtacatatcgtcagccttactggatgtcaccacgttgttttccaaagtttttgcctcattttacccacccctcagcaatgcaccaaagtttctgttgctccacttcttcatcagcatttgatattgtctggtactgtatttctgccaatctggtagaaatgaaaagctatcttagcatgtttttaatttgcattgaccaaattactaaggttggacatctttttcatatgtttattggccatttggggtcccttttcctgttcacattttttggccatttctcatcgggttacctgtcttttatcctattgatttgccataattcaatacatattctgggtactactttttgtcatttatatatataacaaatatttttcatttgttggtgccttgtctccttatattcctgtggtttttattaatgactgaatttcttagtttcaaataagtttatccacctgtcgctttatgatttatacttgttatgtgttatctaagaaattctccactataaggttgtaaaattattctcatattattttcaaaaaatgttataatattactttttacactgaagtctctagtctgcctggaaatggcttttgtgtatggcgtgaggtgggaagaaactttattttattctgcttttcccatatggataaccaagagtcttggcaccatttatttaataggccattcttttttttttttttttttgagatggagtcttgctctgtcacccaggctggagtgcaatggcatgatcttggctcactgcaacctccacctcccaggttcaagcaattatcctgcctcagcctccctagtagctgagattacaggtacatgccaccacacctggctaattttttttttttttttttgagacagattcttattctgtcacccaggctggagtgcggtggtgcgatctcagctcactgcaacctccacctcccaggttcaagcgattcctctgcctcagcctctccagtagctgggactactggcgtgcgccaccacatctgtctaatttttgggttttttagtagggatggggtttcactgtgttggtcaggctggtcttgaactcctgacctcaggtgatccacccacctcggcctcccaaagtgctgggattacaggcatgagccaccacacccggcctaataggccattctttagtcactgatccatgatagctctgttgtgagttgagttgtcatgtgcatgggggtctttcctggttctctattctgtcaatttgtctaaccctttgacaatgctagacaacattgttaaccacaggtttataataaatttcggtatctggaaagagcctccccattcttttcttcttccatcctgtcttgagaattcttggtattttactcattcatataaatttcagaattggctttcaacagaaaaaaaaactatgttcagatttgactggaaatataatttggaaagaagtgatatctttatgaaaatgacttttccaattcataaacgtggtctgtctctccacttatttaggtcttctctaaagtatttaaatacaatgttactattttctttatagcagtagtgcatattttgactagacatatccctaagtggtttatatttttatattgtgtcaattgtcattaaaatacatttttggactgttgctatttggactgattcttgttcaaaatgcaagcattttaaacaagaatcattttaggtgtcatgtgaagattgtaggagaccaaaggaagaagcaagactatcagttcagaggcttttgcaataacccaggctagaggtggtggtggcttgccccaaagtgataatagttgagataatgacaggtggtcagagtggtcagattctagatacttttttgagggtaggatttgatgacattttaggtatagagcatgggagaaagagagaagctaaagatgactccagagtaacaggaagaatgagattatcacctactgagctggcttgagggcagtagaagcagatttggaaggtggaagtagaagcagaaatatgagtttggtcatacaaagatggagatgcttgttagacaatatgtgaagaaatgaaggcttggccccctccacccccaccccagtgaacttcatggtagacaagcaaggcagcttggccaactggcagaaagaaggaatatatcttgtgtaggagggtaaggaaaatgaacttctcagagttcctaaagccacaccttagagctgctacccgttttatttacaattaggggcttgcatttgtaatctccctccaagtgctataaaccatcaaaatgcagatagatgatatctcctaaacccttggctgccagtcccctttgaggtatctgcactccttaaaaacttaaatatcaaagtctagacctttgttatccaatacagaagccactagccatacttgaaatgtagccgatgtgaattgagatgcactgtaagtgtgaaatacacaccagattttaaagatgttacaaactaacaacaaaaaattataaaatacctcagtacctgaaaatattgattacatagtgaaaatattttggatatattgggttaagtgaaatatactttaaacattaatttaacctatttatttttatttttaaaatgtgtctaccagaaaatttgaaattacacatgtggctggaagttgtgcctggctttctatttctaatatttctattggacagcagcctttagaggaatgatacttcttgttttatggccagaggctttcatgggaatagagtttgagatggatgagaggtaggagaagtgaaaagccacttgaaccaaataattccaaggagaaagaaaatatacaagctaataataatgggtttagtacctaaataaaccagggacttgtacttgcaagctcacttaatcctcaagatgagataagtttcattattcccattttacagatgagaaaatggagactcagagatgtaaggttctttgcccttgaagagtgagtgactgagctgggatttgatcctagttccacctgattttaaagcctgtgcacttgcattagaccacactaccactaaagggctgaagaagctacacttctagaaaggaatagtgaatatttggcaggagtatgacagtggttcttcccttttggctgaatgattaattcttcttttgagaattcataggaaacaaaatcattgcagcagggatccttcccctcagcattgcccatgacagcagtggagacaatctgagcatccagttattacagagtgagagtcaattatgggtgatccatcaggaggatgctccatggtcactaggtctgatactttaaggaaaagggcaatgtagaacatgtttatgatatgatggatgattaatgcaatcaaatcattttcacattaattacaagcaaaatatacttgtgatatgggatgtttggggtgttgctttttctggccagaaacctctgtggccagtggcacctttgcctgagttcttgtcctgcatccagtaagaatgagggatgcagtcatgtggagggtgagcaagatgaagaggagctttattaagtgttagaacagctaaaaggagacctagtgggtagcttctctctataggcaggttgtcctgatgagcactcagctctcagcagaggggatatgtcctctctgcagctggttgtccctacgtctgcagctctcagcagagaggaggccctggagaaggtagctcttctctgcagctggtcctcctataatcttcccagctctcagcagagagtaactcctccctgcagctggtcatccagtcgtctctccatcctctgctctgttctggctgaacccagggtttttatggacctcagaggggaggaaatgagagccaactgggccataggtggccatgagcagcctgaaaaagacaacacaagtccccactctggtttgtgggtctggtagcccagcccccagccttcaggccctccttggcttgaaggtgggaccttaccggggccctcccccactccacccaggagcctatctgccccctgctgccttccatggtgccctggctgttcatgccaagggatacctgaaggccagtgcaagtggccttcaaccccttcccctcatcacagcctgaggcaggggctcctgatcctcactgggtccaggccagaatttgggacaggggcaacatcaacaggagctccccctgttgccaaggctgtcaggacccactggggcagagctaatcaagggtccgggctggatgtgggaagtggcaggctcggtggtcaccctgacttagggtggcagactgagacattgccctgggtgtcctgtgcagagcctcctcccaaggcgcaggagcccagcacccttggtgtgggctggctgggtccccgaagtgggcaccactcccactttccacccgggcccctaagcctgaccctagctccacactggcacccctctctgcctgaccatgctgctctcctgtcacgctgctcccctgctggccggctggcaacccggcctggctccatcatggcagcccccagcgtagcgggctgctggagttggggggctgtctgcctcctccccttgccctccctgcagtggctggcatgatggcagtggccgtaccagacttcctgctgctgccatcacttggatgtgaaaattagtaggcataaagagaaatatttgttgatttttgtgttttccatgtaataataagaaaatttctcagtagcgctctaatatcgacttttaaaaggataagcacaaactagaaagggaaatgtagtcaaagataaaggtatgtacacataaagaaattgtgtggaggatggccaaaacatgtgagcaattagtaacgttaaaacacgctgtcaggaacccactgatcaactgtggacagaatccagggagagtggccctgtgtgcagaaggctgcagggtggcagatgctataacagaggcagggtcgagcacccctgcagctgtttgttcccagagtctctgccctgagaatgcctgttctttaggagaaggaggagggtagcaattaaaagggtgatgaagcccaggatggggggtgtgagcctcagggcacaggctcctaagccaaccaggaaccaagcctgcatgtccaatgtatgcatagcagctccacgtggtctcagccttcgagtggtgtgtagggtgattgaatggccaggcagatcagggtggcaaatgcccagatattcaaaaggggaaaagcccagggcactgccctgctgtcagatcacagattcttgtatttccttttagcctcacacacctgtgggcctgtgggccaggacacctttaccctatccgagtgacaggaacagaagggcgggacagtgcccctaggtgagtctacacctctgccagtgggcgggatcctcacaatcaccaccctggaagactgcctttgttccacaaaacacttccttcctcacacaattgcaagtgtctgaatcatctcatttttgaagtgtgtatttaatgtgatgattttccctcccaaagtgctttaattaaatgactgtagcattttataatcgatagagactttgaattgaggaaatacaagagtgagaaagagagcgtattcatgaataacaatgacattaaggaggaacgg

SEQ ID NO: 6919 - DNA, 13487 bp, Homo sapiens
cttcaactcaagcagtgggctctgggtatatacataattttcaccagtttgactgccttctcagcccaaagaagattaaaagcaaaacttaaacaaggatataaggagctctgctagatggaagcatattaatagctaccacttttttttaaaatcactaacagccaggaaaattattaacagcagatactctggcatccaaaatacatagaaatctggtgcttcttattttataaaccaacagttttatatcttaatagcctggagaaattctgagtcatgagcataatgctaatgaaaagaagtacataatctaatttttaatttttttcaggaaaaaggctctaaaagcttcaattatgtagaaaattacctatgtaaattttttattttataggacttttttttggtaaaaataacttacttctcaatcaagcttgacatagtgttactaggcccactaggagcaaaacagatgtttgtttttcaaacatctccctcacataggaagaaaagcatatttttaaaagagtatttctaggctgggtgcggtggctcatgcctgtaatcccagcattttgggagaccgaggcagatgggtcacctgaggtcgggagttcgagaccagcctgaacaacatggtgaaaccttgtctctactaaaaatacaaaaaaattagccaggcatggtagcacacacctgtagtcccacctactcaggaggctgaggcaggagaattgcttgaacccgggaggcggaggttgcagtgagccgagatcaagccattgcactccagctctgggtgacagagcaagactctgtctcaggggaaaaaaaaataagtatttctaacctacaaaagtaatttaaaatttatttcttattaatacttaggaccctggtaaagatgaaatttttaaaaaattctgtcttaactgtattaagaaggaaggccctgtgctccttctgatctacatctaaacaatagcaaccaaagcaataagaagtggccatcgtgtgtttctgaaggtcgtgtatctccaaaatacaaattcagaatactatcttacaattgccaatgaagccgtgtttcagaagcgatgatgagctagtataagattgtctaaattgcccatctgcttgctcaccaggcaatcttgggttttagaaacagtctatcttgaagcattcaaattgaaagccttatttcaacagatgttttgtgcaatgcatagcaactatttccatattttccacatggcaaaacaagttggcttatgaccacaatttgcattcacctttgcattctgctttacatgtttggagttggacctgtaatgcctctagaacaaatatatgcttcatatagaaggaagtaaaacaatggctactgtatcccctgctgttgccatctgccatgtaggatgggaccaggtgtcttggatacattgcctctgaagaaagttgagataaagcaactttctaaatgactaagcaatgaggtctcaggcaaaggccccacaattaattgcctgttgaaaatgaaaattataacattattagagccgttatcatgttagctatcaatgatggatgacatttatagagtacggggcttgtataatactatctatactggaaaaaacctcatgttctgtaaaattgtatattaaaaatatcagggttcattaaagaaccccagactaagatcaactattcatagcacatatctgtcaaaggacttatatccaagaataaaaggacagaaaacttaattttaaaatgggtgaaagacttagacacttcacaaagaagatatacaatggccaatcagcacaagaaaaaggtcccaacatcattacatctgaaaaatatatattaaaatcacaatgaaatacccatttagtagagtggctaaaatgacaaagattaacactaccaaatactgaagatgtggaacactaaaaccacccacactgctggtgggagcgtgaaatgctataaaaactaccgaaaaccgtttgacagtttcttaaaaagtgacagtcacagctatgctatgtcctaacagttctactcctagatatttattctaggtgaaataaaaacatatgtgcacacaaagacttgtacacagacgttcatagcagctttgtccgtcgtaaccccaaactgcatatactgcagatatccaataacagcaggaaaaacaatcaaattttggaatattcatacaaggaaatacaactcaataataaaaaactactactaagaaacacaacataatcccatcatgctgacagaaaaaagacaaacacacaaaaaagtacatactgtgtaactgagttctagaacaggctaagctaacctatcagaccagtggttgttccttagggtgctagaggtggaggcggggcattgactgggaagttgcacaagggaagtttctggggtgatagaaattccgtgttttgatgtgtatttatctacctggttgaatagtatactcgagatctgaacattttatgacatgttaaatacattaataaaaaagaagttaaaagtataagaacaaaataatgcagggattatgagagaaatagggttaagaagaaaccactaaaaaaatacatgcagctgggcagagtggctcatgcctgtaatcccaaaactttgggaggctgaggcaggaggattgcttgagcccaggagtttgagaccagcctaggcaacactgcaagatcctacctctacaaaaaatttaaaaattagccaggcatagtggtgctcgcctatagtcctagctactcaggaggctgaggcaggaggatcacttgagcccaggaggttgaggctacagtgagccatgatcccaccaccatagtccagcctgggtgacagaatgagatcctgtctcaaaaaaaaaaaaaaaaaaaaaaaaaatctgtctacctatctacctacctacctacctatctgtatgtatgtgcaacactgtaaccagagtactaacaaacacacttattattagtactaagaagatcacatgcatcactcagacatgcaactttaaatgcctcacaggatattagaaatacacaaaaacaagagagtggaaatgctggtgatgctttcactagaacagtggtggtggggtgaaaggcaaatgtagatagaggcagcgaggctaacaaggtgaacacaggagggagtatgattggacacagaccagggctctacaaggctggggtagagccctgtaaagtccagagccctgtagaacccagagtgactctggggagggaggcccaggtgcagacacttattttaattttctcaaaataaagctgaaagggttcctgttgtctgttcagcagccaagctaaggactttttcctttcctgaggaaggtgagagttctattcctaccaatccagatccaagtgccaagaaaatcgtgaatgaaacaacataatttctatactatataaccacagcatttccccatttacaaatcacaaatgagatgattcatgttatagaaacgtattctagcagaacacaaatatcaactgtggccaagcattagctactattttgcatttattatgttatttatgtaattcacaacaactgcatttaaccaaagaggatactgaagctcagagaggcaatgtgatttgctcaactttacccagccactcttctgtggactttgagtgagaacacaggtttgttaatttcaaatcccatgttcttaatcattatactatacttcccagattacttctccatatctgcatttttcatttgggaaaacttgggtccctatcctatcagagttgttgagcaagctgtatttggctttggttttctccttggccgtcaccccaaaaccttctatctttaagtatctcaatcacctggatcccttcacccgccttctttggctcatttccctcctgtttactgactgcttaggacacggctttcatcttgaatccatgctccaagccctaagggttttacctctgccatacctcccgccctccatgctaagaatagcaagctaaaagagtgtttgcagtgatatcatctaggtgaaagtctcctctaaactaggaagttcatgtgcagatactacgttcaaataagaaattatgctatatcagagtttcccaggatctcttttcaaggaaaaatttgtgattcttaaaggtaattctctcattgtctatgagaagactgactccatgaagatttcacgtcagatgggaacaagagatggtgaatagtaagggggtgatagttttggattgtatcaattagtccatgatttctgtacataagattcaccctaatatgttatatacacatcctataagcttttaaaaatttcctttttagatgagttcatgtcctttgtagcgacatggatgaagctggaaaccatcattctgagcaaactatcgcaaggacagaaaaccaaactctgcatattctcactcacaggtgggaattgaacaatgagaacacttggacacaggacggggaacatcacacactggggcctgtcatggggtggggataggagaggtgtagcattaggagaaatacctaatgtaaatgacgagttaatgggtgcagcacaccaacatggtacatgtatacatatataacaaacctgcacgttgtacacatgtaccctagaacataagtataataaaaaaaatttcctttttaaagcaaacactaattataatccagtcatgtgtctattaacaagatacttggatataaacaaagtttagatgcagaagaaataaaatatataagtaaccattcaagcaattgaacagttttcatggcacatttcttgaagaatatcatgcacatgaattgcctcataaatcagcccagtcctgaaggcaattgaaaacttgaacaatatcatttattcaagataaagttcaggatttctgatcaaacatcacatataaatttccagttgtagtgtgaacattatgcacattgatctgaacatttggacaaaccagctgcatccccacacaatgtgctgatgcaacttagatggatcagaaaacaattgtctgaaatactttgtgaatttattaaactagccagagagtttcagaaaagctaaatagatataaatatgttttgttttctgactcagaatcagatgtctgactcagaactcaaacagcatggggtggcagtggtcatggcgggatgtgcgtggacgtgtttgtgtgataactgcagtcattgacatttgtttgcagtctatctggaacatctgctatatagaacattttgaaaatacgtgctatctaaatttccctcttctctcaaagattgaatttaaagggcattgttagaaagatcgtaagtacatggtcatataagcaaaatcctgatttgtatgggttttttgggcagcaaaagatacaagcaacaagtaagggatttcataaatctggacaggttatgcataactcaagacagaaaggaagtgtccactctacgttatccaggcagaaaaaaatacacgtatcaacccagggcagctttcatattctgcttttaagtgtatttgaatctattgggccgtgaagataaactgggaagacaacaatagcaagttcataatatcaagaacgtgcactttggggtaagttattaaagttgactcttctaagaaaatactgcaagaaaatcacagtgaggaaggggaacaaattcttagtagtttataaaactcaggtataatattgatttaatcaaaaggcaaaactggagcaaaagaatagtcctgggcacagtgtctaaagcagacacaccttaaaccaactttggaatgccttatgattcatgtctcaacatgaacagttctaatcacaagggaaccttctccaatgccctctgagcagtagtaaaataacacacagactgtgtaatttaaagactgccttactagcttaacagagtgaatcagaatattgaaaactggcaaattcaataaaggtttaaaaattatgacaataatatgttgaataaccactgctattttaatgttttatttatttatttgtttgtaatttttgtagagacagggtttcaccatgttgtccaggctggtctcaaactcctgggctcaagcaatctgcccacctcggcctcccaaaatgctgggattacaggggtgagccactgtgtccggcaaaccattgctattttaaaactagactatttcttaaactcctaaatagctttctcagataatagtagaaagggtacaataaatccaaaacaaacacaagtctgaaatttttcatctctagcctaccttaagcttatatattaaatatataattatttataattatataacaattaacaaataaacaatgtttatttctcaaaccaagtaactttctataaaaagaatatttatactgctagaacaagaaactggctgaacaaaagcaattgtctgataaatggctaaataagtaaggtttatttttaccatattaggtttctagaatgaaacaattttatagctaatctgacatctgtaatgtgacaactgtcttctcacataaatctctggtaactgtttatatacttttgggtaatacagaaaaatgacaaatattccaatttttaaaatgcaaaatatgtatgtagatgtatgtagagaatgcattaaaactttaaaagaattttcacacatttgatattttgatatacactgaattcataattattttgcccaaccccctaaaatttccaaagaaaatagacgagcaaggccttttctaccatatgagaggaaaaaaactagctaataaaatcagagtataatatayaacaacttgcaagttcaaatataccatgcatactagatttttctccttgtttacttttagaaattttgagaagttttaattaattttaaaagaaaaaaacagccacagacaaaaccagcttataataaaaaggcaaaaagggaagttaatggttaaacccatgcatgcacctagccactcagcaaacctctctgaaagccccacaatattgccttctcaaaccatttcattgtcataaactcaggaataatatcctagctgtaatctagaaaaatgtctgtagtcctatgccccgcctgagggtggacaaaaactgggtcataaatgaatatttgctactcactcttcagtttccttgtcttctgctgaagtgcctggcaagtgttcgataattcagtatttatagtttgaaggttccgttgttccgaaattrcttcctctaatttatgcagtaaagacgtagctttttcactggcagtgtgggcttctcgatctcgatccttaccctggacrtggatagttagtgctggattgtagcagtgtggccaggaaagaaagcaatggagtgctcactcttatgatgcaggcaaaactgaaaatgtgtttttcttctcagggaagtgataagcctctcctgaacttctgcaattctgtgtttgcatgggcttggtatgcctgagctatttctacagcggttaaagtcctgatatgtcaagttgcctctttctgcagagtcgcctctttcatcagcaggctgttgataccgcctctcttacaactccccctttacttcctctgctcactgttagtcgctagggactgaacttgcagttcctctttgctttttttttttgtttgttgttgttgttcctcctccatttttatttcatggtttgcagggcatctgaggagatgtcccctgaatctaatgtagccatgagccaccctacctgctcctccacatcctccagccgttggctggtttcttggagcctcttcctaaggatgccttcctggttgacagcatcttcctgtagttgtttaatggcttctagttgtttctgactggagttaaaaaaaaaaaaaaaaaaaaaaagtccaaaccgcaagctgtcagtgacatttcaactaagagtcaccctgtgaaattatgacaaactcaaacttaacaccacttccttagagatcagaggaaaaagtgaaagtatttacatataaatgcttcacaaatataaaatcttaagcaaagcttattggtcgcttagcctgacaccctcactttacagataaggacttctagtttcatcttttacactggtgtgttcagttcccaccagctgcattcatagcacttagcatcagttgccagttgccagttactcagaagatggctctacaatgaggtcagggtgacaggtgcaacatttacacatcacagctagcttttacagaaaaagaaaggaatggggtaaaggtagggggagggaaaagaaaaggaaagagagctttgtttcatgaccttagcctttctccttaagggttgtcaatcatagtataaacacgtgccacgagcacaggaaggaccgcccccaggcacagatgaaagctggcggttgatatttctactttagtcctctttttgctgaagcttttctccccatcacccttccccaccacagatctcatggtgccattacgttacacctcatttggatccaattctaatctctaaaacatgtaaaaatgcacttactctctgttagcagatgagattatttaatgtgtgttacatgccagtacctcaatgattatctggaaacaatctgacttgaatatggaccttaactcaaagtggtgataaatgtcgggagttgcaaaacaacaaggaagacattgtcagccgtaggccttgtgcatgcctctcaaacgttaacatttagtcagaatgccactgcacactggcacaaatccagccctggttacacgaaggaccacatgagaggcaagaatggtctcacagaatgcttaccatactggtaaacaagcaaacaaaatcctaagcaaaaataaaaactgcctacatcaccacactttccactgagcgtccttcaatagcttatcgttgtctctctctctctctttttctctctttttctttaactgtggcaggaacatttaacaggagatttacccacttaacaaatttttaagtgtacaatacagtattattaactacaggcataatgttgtacagcagatctctagaacatcttcatcttgcataactgaaactttatacctattgagtagcaactcctcatttcccctcccctagctcctggcaaccactattctctctctttctattagtttaactattttagatacctcagagaagtgggatcgtgcagtatttgttgttctgtgactcacttattttacttgggatagtgtcctccaggtttatctatgttgtcatatgtggcagaatttccttctttttaaaggttggataatattcccttgtatttacataccaaattttctttatccaatcatccgtggacattcaggttgtttccaaatcttggctattgagaataatgccgcagtgaatatgggaatgcaaatagctcttccaggtgctgattttaattattttggataaatacccagaagtggggttcctagatcagatggtagtttaatttttaatattttgagaaaactctgtaactgtttttttttttttttttttttttttttttgagacggagtctcgctctgtctccaggctggagtgcactggcgcgatctcagctcactgcaacctttggctcccgggttgaagcgattcccctgcctcagcctcccgggtagctgggactacaggcacgcaccaccatgcccggctaattttttgtattttagtagagacggggtttcaccatgttggccaggatggtctcgatttcctgacctcgagatccgcctgtctcggcctccgaaagtgctgggattacaggcatgagccaccgcacccggccctccataacattttctatagtgcctgcaccactttccattcccccaactgtgcactaggactccaatatctctacatcctcaccaacacttttttttatttgttttttgtttttgtttttttgagacggagtctcactctgtcacccaggctggatggagtgcagtggcgcaatctcggctcactgcaagctccacctcccaagctaacgccattctcctgcctcggcctcccgagtagcttttttttttttttttttttttttttgagacacagtctcgctgtgttgcccaggttggagtgcagtggcacaatcttggctcactgcaagctccgcctcccgggttcccaccattctcctgcctcagcctcccgggtagctaggactacaggcgcctgccactatgcctggctaatttttttgtatttttagtagagacagggtttcaccttgttagccaggatggtctcgatctcctgacctcgtgatccgcctcagcctcccaaagtgctgggattacaggcgtgagccaccgcatccggccgtcttttaaaataatagccatcctaacaggtatgatacaatatctaattatagtcttaacttgcattttcctaatgattagttatgttgagtatgtttgtacacctgtttggccatttatcgtcttcttttgagaaatgcctattcaagtcttttgtctatttttaaatctagttatttgtgtttttttattgttgttctggagttgtaggggtttcttatattttctaaatattaaccccataagtgaaggacctcttcaaggagaactacaaaccactgcttaaggaaatcagagaggacacaaacgaatggaaaaacattccatgctcatggataggaagaatcaatatcatgaaaatagccatactgcccaaagtaatttatagattcaatgctattcccattaaactgccattggcattcttcacagaattagaataaactatttaaaaattcatatggaatcaaaaaagaacccaaatagccaagacaatcctaagaaaagagaacaaaactggaggcatcacgctacccgactttaaactatactacaaggctacagtagccaaatagcatggtactggtacaaaaacagatacatagaccaatggaacagaatagagaactcagaaataggactgtacaccagcaaccatctgatctttgacaaacctgacagaaacaagcaatgggaataaatggtgctgggagaactggctagctacatgcagaaaattgaaactggtccccttcctcaatccttatacaaaaattaactcaatatagattaaagactaagtgtaaaacccaaaactataaaaaccctggaagaaaatccaggcagtaaaattgaggacataggcacaggcaaagatttcacaacaaaagcaccagaagcaactgcaacaaaagcaaaaattgacaagtaggatctaattaaactaaagagtttctgcacagcaaaataaactatcatcagagtcaacagacaacctagagaatgggagaacatttttgcaatctatccattggacaaaggtttaatatccagagtctgcaaggaactttaacaaatttacaagaaaaaaaatattacaaagtggtcaagccaggctcagtggctcacacctgtaatcccagcactttgggaggctgaggcgggtggattgcttgaggtcaggagtttgagaccagcctggccaacgtggtgaaagcccatctctactaaaaatacaaaaattagctgggtgtggtggtgtgtgcctgtagtcccagctactcgggaggctgaggcagaggaatcgcttgaacctgggaggtggaggttgcagtgagccgagatcgagaccccgccattgcactccagcctgagcaacagagagagactgtctcaaaaaaataaaaaaataaaaagtgggcaaaggacaggaacagacacttctcaaaataagacattcacatggccaacaaacatgaaaaaaagctcaacatcactgatcattagagaaatgcaaaatcacaataagataccacctcatgccagccagaatggcaattattaaaaatcccagaaacaacagatgctggtgaggttgcagagaaaaaggtatgcttttatactgttggtggggtataaattagttcctccattgtggaaggcagtgtggtaattcctcaaagatctaaatagaggtagaaataccatttgacccagcaatcccattactgagtatatacccaaggaatataaatcattctattataaagatacatgcaagcgtatgttcattgcagcactattcataatagcaaagacatggagtcaaccaaaatgcccatcagtgatagactggataacgaaaatgtgatacatgtacaccatggaatactacgcagtcataaaaaggaacaaggtcacgtcctttgcagggacatggatggagctggaagctgttatcctcagcaaactaacacaggaacagaaaaccaaacgtcacatgttctcacttatgagtgggagctgaatgatgagaacacatggacacattgtggggaacaccacacactggaagcctgtcaagcaggtgaggagggagagcatcaggaagaatagcaaatggatgctgggcttaatacccaggtgatgggttgatctgtgcagcaaaccactatggcacacatttacctatgcaataaacctgcacatcctgcacatgtaccctggaacttaaaagttaaaggaaaaaacaaaaacaaaaacaacaacaaaaaattaaccccttatcagttttttagtttacaaatattttctcccattccataggttgtcttttcattgcattgtattctttgctgtgcagaagcttttcagactgatgcagtccaacatgcctattttgcttttgttgcctgtgcttttggtgtcatatccaagaaatcttgccaagaccaatgttatgaagctttcccccatgttttcttctaggtgttttcagttttaggtcttaaatttacatctttaatccatttttaattgatttttgtttatggtataagagtccaatttcattcttttgtctgtggatgtccagttatccctgcaccatttgttgaagagattatcctttccctattacatattcttagtatctatgttgaagatcaattgaccatctatgcattggtttatttctaggctctctcttctgtttcattggtctatatatctgtctttatgctaataccatactggtttaattactgtagctttgtaatatattttgaaatcaggaacggtaatgtctccatctttgttctttcttctcaagattgttttcagctattcagggtccctcatggttccataagttttaggattttctttctattcctgtaaaaaaatgcgattggaatttttgttagggattgcattgaatctatagattgctttgggtagtatggacatttaaacaacatgatctcttccaatctgtgaacg

SEQ ID NO: 6920 - DNA, 13000 bp, Homo sapiens
aaacgcatggtcttgatgagacatttgtacacccattttcagagtagcattattcacaatacattcacaaaaacatggaagcaatccaggtattgatgaatggataagcaaactatggtctatctttccatacattggaatattattcagccttaaaaaggaaattctgacacatgctacaacacagatgaaccatggacatcatgctaagtgaaataaactagtcacaagaaggcaaatactatattattccgtttatataaaatatagtagttaaaatcatagagaaagaaagtagaatggtgcttgccagtggctggaagcagagaacgaggagttattacttaattggtagtttcctttagaagaggaaaagtgagtgtgggcacagtggctcacacctataaaatcccagcactttgggaggccaaggtgggtggatcatttgaggttaggagttcaagaccagcctggccaacatggggaaaccctgtctctactaaaaatacaaaaactagccgggcgtggtggtatgcatctataatcccagctacctggggaggctgaggcaggagaatcacttgaatacgggaggcagagattgcagtgagccaagatcatgccactgcactccagcttgggcgacagagtgagactccatctcaaaaaaaaagaagaggaaaagtgttatggagatgaatggtggttgtggtggttgtataatgatgtgaatatatttaataccactgaactgtacacttaacaatggttaagatggtaaattctggccgggcgcagtggctgacgcctgtaatcccagcactttgggaggccgaggcaggcagatcacctgaggtcaggagtttgagaccagcctggccaacctggtgaaaccccatctctactaaaaatacaaaaattagctgggtgtggtggtgggcacctgtaatcccagctactcaggaggttgaggcaggagaattgcttgaacctaggaggcagaggttgcagtgagccaagatcacgccactgcactccagcctgggcaacaaagtgagactgtctcaaaaaaaaaaaaaaaaaaaaaaaagatggtaaattttatgggtactttatcacaaaaaaaaaaaatggagggaaaaagactaatattcagtgtctataatgttttaaacagtatattaatgtaattttcccttgaatataatctgttatcttcataatctaatgaatataaaagtcaaggtaattattaaactgtcggtaactactgaaactagctttgccaattatccctactattttctccttgaacagatatatgaactgtaaatcctgttcaaatactaggaaaactgtgttgcacagtattcagaagtataagttttagaattgggcagatcagggttcaaatcctggctctacctaacctcaaaggattgttgttagtactaaaattcagccacgtccagccccttgaatgcaaggacatttttgcttatttgtggtggcagacatcacgaaattatgcacagaccctttttccagctatcattactgttagcatattttatgtgtgacccaagacaattcttcctcttccaatgtggcacagggaagccaaaaggttggacattagtgaactaaatgaaatggtgtaaaaaagtctgtcattataggtgggtgtcctgacaaaaaataaatgctcagtaaatgtactctacatagactaaaatccttatcatcttaaggctatgcttcctaagaaaaacttgaattgcaagataaatgtattatagcctccttccctttcatatcaaagccctgaagtttcagaaacacaaagaatgaaacaaaagaaaaatacagaataaaagtaactttcagaagacagattaaaacatttatccctggccgagcgcggtggctcacacctgtaatcccagcactttgggaggccgaggcaggcagatcacgaggtcaagaaaccaagaccagcctggccaacatggtgaaaccccatctctactaaaaatacaaaaattagctgggcatggtggcacatgcctgtagtcccagctacttgggaggctgaggcaggagaatcacttgaacccggaaggcagaagttgcagtaaccaagatcgtgccactgcactccagcctggtgactgagaagaaaaaaaaaaacacaccatttatctctatctcctaaacaactattatgctgaaagtacaagcagtgttactgtccctgatgaagatcttccagtggaacacgatgtggagatggaagacagtgatactgatgaccccaaccccacaaaggtggctgagtgaagtttgttggacctggatggtaaacagtgctatttgtgctgatatacctgagaattaagttagcattaacaaaacctagtaatgtacatgtcaaacaaaatatgacttcttttgtgctttgtaacttcatttaaagcagataagccaatcacactacgacagtcaagatgaaacagggttataaagaagttgcctaaaatatatgttcaaaagacccaattaagtaacagtctagaaggccaggcacagtggctcatgcctgtaatcccaacactttgggaggctgaggcgggcggatcacttggggccgggagttcgagaccagcctggccaacatggtgaaaccccatctctactaaaaatacataaattagccaggcatggtggcatgcatctgtaattccagctactcgggaggctgaggtaggagaatcacttgaacctggaaggtggagggtgaagtgagctgagatcacgccactgcactccagcctcggcgacagagcaaaacgatttgatgtctcaaataaataaataaataaataacattttagtagataaaacacacaaatctaacatcacccagcacaggaatttacatcctcaggtgtataacgactgagggctgtgggtgcggaacaccttaattccaattctacctcagccattcattaaactgtgtgcccttgtagatgtttcttcatttaagcctccaggtataacctggacataatacccgcctcttaggatccttgtaaggaataaatgagtttgaaaatgtgcttcacaaattattatcaggcgttttttgccccaagtcagtcctgtattttctctcccttactcattgtccccttacaccacctaccaaactctgatctcaaactttccagtgagacctaaataattgaagatgccccccaccccaccacccaggaggttgctacattcccacacagcttaatgttaaaaagataaagcttagatttttagaattccagtgagacagtaaagcagtgcactttgaagtgcatcctctactgcaagaactgttgcagatagtaacagtgtcaaatggcagaagaattaattcatatggtgataaagggaaacgatctttttttccttgtgattttttttttcagtagcatccacatcacctaagaggtttcaagaaaatgcagagccttctcagacctactgattagaacatgcactagaaccagattaatgatgctttatatataattcacatttgagaaatgctgctcaaaaccccacccgtgtaggtggcctgcaagtacagttcaatttcaatgaaaatttgggagacaggcacaacccaaactctataaatacagaatacttactatttagagctcacccataatgcatatttcaatattaaaataatcaacaactgacaacaaaaaagatgcttttaaaacaaagcacagcaactgtaattagtccttagtcacaataaatactaacttcccatacagaaatcatatgcatcagtgtccacaccaaaatcaatatttagaatacacaactttcttcacaagaacatagtaatttttttcattttaaaagctacttacttctccttcagattttacaccaattacttttccattctgtacaatgatttcttcaatgggtttattcagcatataggtacctccataaatagcacttagcctggaaaatttttaaaatcccaattaataatatatagttgtttcaactcctaaagtcccctttcttagatcttaatgagttacagacaatatacatttgttcaatttccttctagaaagatgtcagcttagaagtgattaaagcaagaaaacagagtcaaaaacacaaacataatcagttataaatacgaagtcaaaaaaaatcactaaccaggcacttgtctttcgagctgcccactcggccctcctccaagtgtactttctttccttcctttcattcctgccctaaagcttttcaataaacgtccactcctgctctaaaacttgcctcagtctctccttctaccttatgccccttggtcattctttcttctgaggagaaaagaactgaggttgctgcagacccgtacggattcatctcagcacggtaacatattttggtgcctgtgactcggctaccttccaccagcaacacatttggtgctgtgtgactcggatacattccctagtagtaagagacctctacacctcattttctttggctggaggcgttcaacccccatacacggttttcttctcccctttccactctcccgcttgctaaccaatcaccggaacagttcctctcggccgcagcggctctgcatccatagcttatccctcctcgctcaccctgatggatggctcttcggggtccacactgagcagacctgagacactaatggccctcctggacaggaggctcgtgagtgtggtgaggctaaagcctaaagccatgcgatgtctgggttttactctgcttcttcaactaaaatcggctctttcccaaaaccccacactgtctattctcctgtttttccttgtgtgtgtgttctaaaatggccttgtgcagtcgcgggactatccacatcagaggcaaatctgccatttctctggattcacacccaggggaaggggaagggcaagggcaagggcaaggccaagggaagggttgaccagtaatagctatattagtctaatcctctggcatataaataaaactatggacttaaaacactatcagaaggaactgaaggcagtggttcacgcctaatgccaccactttgggaagccgaggccagcagatggcttgaacgcaggagtttaagaccagccttggcaacatgctgaaaccctgtttctacaacaaatagaaaaattaaccaggcatggtggcactcatctgtagtcccagctacccggaatgctgaagtggcagcatcacttgagcctgagaggtcgaggctgcagtaagtcgtgatcacaccactgcactccagcccgggtaacaaagcaaaatgctgtctcaaaaaaagatagtaataaagtggggggaaaggcagcactggagaatgacttaaagcagcaaaaaccagagactgaagaaactcttgaaaggaaccaagtgggtgagagctttatgtagtttatatggttttcccctcaggcagcaacttccctagtccttgcaacatggtacagctacaacagaagcacaatgcctgcagtcctattgatttgagatgtgacagaatttggggcggccagaggagatgaaaattgtaggggaaagtttcacaaaagagggagcctcaaaagaaggagccaacaaatctatgataaaatatcttcaaatccttaactacctccagaagtgctcacacaggagggaaaagcgaaggaatccaccagaaataaacagctgaaaggctcaaagaggttagcagagattatagaggaaggacagaagaaaaaatgtgtctgaagtttaaaattgccatgttcaaaggagcttgcttactccagaggagtaacgtttaagaataagcagaggccacttgcgcgtgtgacgtcatggcaccgtgcgtggcagcagcagcagcgcaggtggcaggcccgtggagcagtgctggaggaggaagtggtgagkttgttgctccctctgcgccccgctgctggctcttgaacgcagagaggggccacagtccctgcggctgcatcgcgcttccctgcagtcccctccatgttcccctgcgccactgctccccttcctaaggctgccacttaccccggagtctatgaaaataatggatccctcaacctggctcatcaacagagcagatgaacagaccatttatcagcaactacaaagaagctatttcttgtcacaaaaaggctgcggcatatccttcagaagccgtgaagctgacagtctgagcaggctcatttttcactggaattgcaaaggaataggaaacagcgcctcctcatccaagacaggtggaaaagggcccagcgtgaaaagactgaaagcccagcagaacacaggatgtagctgcccatctcacaaaccctctgctgaggatgcagagagccagagccccctttctcagaagcacagccctttcacagagaaatgcctgcctgagattcaagggatctttgacagggatccagacacgctactatttttactttagcaaaagagtgagccagcagagccatgtattagaagcaaaggcccgaaagataaaacaattatagagaagcagatttgaagaggcatgtggaattccttgtggctgagaatgaaagattaaggaaagaaaataaacaactcaaggctgaaaagggcagacttctaaatggtccaatagaaaaggagctggatgtagatgctgattttgtagaaaagtcagagttatggagcttgccgccacattcagaaactgctacagcctctttaacctggcagaagtttgcagcaaataccaggaaagccaaggacattccaatccccaatcttcctcccttggattttccatctccagaacttccccttatggagctgaggatattctgaaaggatttatgaataattaaaatggaaggccagagaagaggggagaagaggaaataatgcgaaaacagttaatccagcaaaaaaattaaaagggaaaaccacatagaagggtaatcccggaaatgcttcatctggcagactgtgggagaagaggcattgccaggacttggcaaacagtcactgtgaaatgtatctgattcactgactcgagctaatgattccaacttagtacacactaaattcatggaggttcagtttctccagatacaaaccaaatggctacatagaataattttttcaagcaacaattacttgtcttgtcttcagggttaaaatgcataaaagttatgccaggcacggtggctcatgcctgtaatcccagcactttgaaaggccgaggcgggtggatcacctgaggtcaggagttcaagaccagcctggccaacatggtgaaacactatctccacaaaaaatacaaaaattagccgggcatgatggcaggtgcctgaaatcccagctactcaggaggctgaagtgagagaatcgcttgaacccaggaggcggaggctgcagtgagccaagatcatgccattccaactccagcctgggtgacagagtgagactccatctcaacacagtcatttctcaaaagaaaacatttatgcagccaagaaacatgaaaaaaagctcatcatcactggtcattagagaaatacaaatcaaaaccacaaaaccatgtgagaaaccgtctcacgccagctggaatggtgatcgttaaaaagccaggaaacagcagatgctggagaggatgtggagaaataggaatacttttacgctgttggtgggagtgtaaattagttcaaccactgtggaagacagtgtggtgattcctcaaggatctagaaccagaaataccatctgacccagcaatcccattactgggtatatacccaaaggattataaatcatgctactataaggacacatgcacacttatgtttactgcagcactgttcacaatagcaaagacttggaaccaacccaaatatccatcaatggtagacgggataaagaaaatgtggcacatatacaccatggaatactatgcagccataaaaaaggatgagttcatgtcctttgcagggacatggatgaagctggaaaccatcattctcagttaactaacacaggaacagaaaaccaaataccgcatgttctcactcataagtgggagttgaacaatgacaacacatggacacagggagaggaacatcacacaccggggcctgtcaggggatgggggctagggagggatagcactagaagtacctaatgtagatgatgggttgatgagcacagcaaaacaccatggcacatgtatacctatgtaacaaacctgcacgttctgcacatgtaccccagaacttaaagtataatttaaaaaaaagtataaaagtatgttatgcataattaatctataatgccataaatgatcatgcaaaacttaaataatatggtggcccgaggggctgccttgtaattgaaacatgctttctttcatgcattgactatatgcattttgttaatgtgcattttgtttaaataagttgtgtaagagacacacctttctagatgaaactatacgtgtgtgccacactttgcactactaatgatcacctcaagactatcaggagaaatatttaaatttccattttatgaagaaaggaaccaaattattagttatgcttttttaaacaaattaccagtttacataattaataagggtgcattttaagttctaactttgtttattgtataatgtaccatttaaaaataccaaggaggaaatatcctttgcttttaatgatgcatgagtggaagtaatgctagttggcagtatttgattgtaagaaatcaataaattgtgatttaaaaaaaatcagcaaacaacaaaaggaaaaactaaaaggacccactttaacaaggtgtaaaatccagtctccacaaatgcaagatgaacagtcaataaaaaaatgtaactgcctactcaaaccaaaaccaacttttcagaggaagaatccggcatctcaacaaactatcaattcatgtgtccagtatacaatccaacattactagacatgggaagaaacagaaaactgtgatccaaagaaaacagaaaaacaaacaacagaaacagatgcccaaatgttaaaatacgcagtttaaaagcagctattataaatacgttcaaggatattatatgttcaagaatatgttccagaacaaatatccttgttcaaagatacatattcaaggataaatatgttgttataaatgtactcaaaacagtcaagtaaatagagaatatcacaaaaatgaaaactataggccgggaacggtgactcatgcctgtaaagcagcagtttgggaggctgaggcgggcggatcacaaggtcaggagatgagaccatcctggccaacatggtgaaaccccatctctactaaaaatacaaaaatcacccgagtgtggtggcatgtgcctgtaatcccagctacttgggaggctgaggcaggagaatcgcttgaacccgggaggcagaggttgcagtgagctgagatcgcgccactgcacttcagcctgggtgactccgtctcgaaaaaaaaaaaataagaaaaaataaaactatagaaaatgagaactctagatctagacagtataaaaaaattaaaattcactgaatgagattaacagcctattgaaaatagcagaaaaggtcagtaaacttgaagccacatgaacaggcattctccgatatgaagcacagagagggggaaaaaaaaaagtttgatgctttttttttttttgtaagagacagggtcctgctctgtcacccacactgaaatgcagtggtatgatcacggctcactgcagtctcaacctctcaggctcaagggatcctcccactcagcctcccgaatagctgggactacaggcatgcatcaccacacccagctaattttttgtgtttttctagagacagggtttcaccaggttgcctaggctggtctccaactcctgggcttcaagcgatccacccacctcaccctcccaaagtgctgcaattacaggcatgagccaccatgctcacttaagcccagaagttcaacaccagcctgggcaacatggtgagactccatctctaccaaaatacaaaagttagccaggtggggtggtgcatgcctgtagtccctactactcaagaggatgagatgggaagatccctttagcccaggaggcagaggttgcaatgagccaagatcatgccactgcactctagcatgggtgacagagtaagatcgtgtctccaaaaaaaaaaacaaacaaacaaacaaacaaaaaaacagaccaaactataaatataagtgaacttaatgtgacaaaaccatctacaaaaaaaaaaaaaactatagaaaacatatttaatagtaaaatatttactagattccccgtaaaactgggaacaaagcaaggacgtccattctcatccctgcgacattatcaggaagtcctaacaagtgcaataaaggtaagtgggggaaaaacacataaaagttataaaagaagaatctctttattcacagatgacatgactgtgtagaaggataattctaagaaatatataaaactagaaaaactagtaagtgaactagtaaaacttaagtacaagatcataggatacaacgtcaacatacaattacatttctgtataccagcagcaaacaatttcaacataaaattaagacaatttcattaacagcagcatcaatacaaaatacattaacagcggcatcagtacaaagagattgaacaaaaatgtgatagatctctacagtgaaagctgtaaaacactgctgagaagaaaaccacatggagaacaatcatatttatggactggcagactcagcataattaagatgatcattttctccaaactcatctacaaatttaactcaatatcaaaatcccaacaagcatgttttctagaaattgacaacctgattttaaaaacgtatatggaaatgcgaacacccaaaacaaattctgaagaaaaagttggcgaaagtgttatcacctacttcaagacttaatataaaactataattatccagacagtgtagtactggcataggaaatacaaatcactgaaacaaaactgagtcccaaaacaaactcatatgtagccaactgatctcccacaaaggcaccacgactacctagaaaaggaagtctttccaacaaatgcagctaaaacaactaaatattcgtatgtaaaaaaaaaaaagaacctcaagtcttacctcatcccacacaccaacactgtctcaagatgaatcagatttaaatgcacagataaaattataaaacttctaaaaaaaaaaaaaaaaagacaataggagagtatttctgtgcccttgggggcaagtaaaagacttctaaaatagggccaggcgcagtggctcacgcttgtaatcccagcactttgggaggccaaggcaggcggatcatgaagtcagcagatcgacaccatcccggctaacagtgaaaccccgtctctactaaaaatacaaaaaattagccgggcgcggtggcaggcgcctgtagtcccagctactcaggaggctgaggcaggagaatggcgtgaacccaggaggcagagcttgcagtgagccgagacagtgccactgcaatccggcctgggcaaaacacccagactctgtctccaaaaaaaaaaaaaaaaaagacttctaaaataggacccaaaaagctataaacattaaaaaaattttttctttgatatactggacttcatcaaaatgtaacacttctaggccaggcactgtggctcctgcctgtaatcccagcactttgggaagccaaggcaggtggatcacttgaggtcaggagttagagaccagcctgttcaataacggcaaaaccccgtctacccaaaatacaaaaattagccaggcgtggtggcacatgcctgtagtcccagctactcgggaggctgaggcatgagaattgcttgaacctgggaggcagaggttgtagtgagccaagatcatgccagtgcagtctagcctgggcaacagagcaagactctatctcaaaaaaaaagttaacacttatgcttatcaaaagaccagccataaactgggagaaaatattcttaatacatatatgacaaaagacttgccaccatcatacaccaagatctcctacaagtcaaaaacagaaagacaatccaatctttagaaatgtgcaaaagacttgaacaatcacagcacaaaattatacaaatggtcaataagctcatgaaaaggtgagcaacatgagtcaagaaatacaaattaaaaccataatgagatagcatttcacacccacttgggcaattaaaattaaaaacttacaatactaaatgttgacaaggatgtggagcaacgagaactctcatacactgctgagtgtatacacaatgacacaaccactccagaacactgttttacagtttcttatgaattcagacttctatctgccacattagtcagcaatttcactcccagtatttacccaaaaggaaatgaaaacctatatccccacagaaagtgttttacataaaaatttcacagtgccttcattcataatagccaaaaactgaaaactaactagatgtccaccaaaaggagaattatatgctcatataattcatacaaaggaattctactcaacaattaaaaaaaaagaattggccaggcacaatggctcacacctgtaatcccagcacattgggaggccaaggtgggtggatcacttgaggtcaggagttcaagaccagactgaccaacatggtgaaaccccatcactactaaatataaaaaattagccggatatggtggtgcatgcctgtaatcccagctccttgggaggctgaggcaggagaatcactggaacccagggggtggaggttgcagtgagctgagactgcaccacagc

SEQ ID NO: 6921 - DNA, 33547 bp, Homo sapiens
ccttctaggtctaaagtgtatctagtcctgggtataaagcttgtcctgggtatgattttcatccagtctttatacaaaaatactcattgagttcctgcagataactgtgctgggcttaagagaaaagagatgtaacagggataactgtgctgggcttaagagaaaagagatgtaacaggggtaactgtgctgggcttaagagaaaagagatgtaacaggggtaactgtgctgggcttaagagaaaagagatgtaacagggataactgtgctgggcttaagagaaaagagatgtaacagggtctcttcgctgagcagacctgagccattaaacagattgttacccagtagttgaaattcagaatggaaaattggttttaagtaatgaacatactttatttttttctcctccttttagatggtgaagaaagccaagactatgatgaagaatgctcagaagaagatgaatcggttggggaagaaaggggaggcggatagacacgtgtttgatatgaagcccaagcacttgctgtctgggaagaggaaagctggtaaaaaggacaggagatagtatccgtttggttggcgtggcttcgctagagtgttgctgtttatttcctggtttggcacagtatggtttcatgaaattggagctctgtataaactgaaaaagacaaaataagtaaagcacttgttgctttgctgaaaactatggttaaccctatataggtgtgggaaatttttgtcactgcataatattacaaatattttgagtagacagtgtttccacatttaatggagtatcagttgcttcagattttcagaactgggaagatttactggtgtaactgggttgtttttgatggagaaaaaccttattttcttttgtaagagctgggagcaaacacgtttatgagtgtgtcggaatcccgtgcttaaaatacgctcttaaattattttctagtcttattttacaatgtctcattgtagtctgtcttcaactattttatccaaaataaacctccagaagaaagtagttttcatttacttagctcatgttttggtttagttatagtcgctatggatttggccaaataaaaaggcaaacaacatgacatttctattttgttttaaagcaaaaatacttttgggggagtaaaatgttgctggaggcattaggcaattaaatatgggcattctcctatttctgtggcccgtccctgaagttacatgttcagtaaaacacaaaaacaccgccaatgccacctcaaaagcacctgctggggagcgttggggtgaagagctgtggggtcggagggacctgcccaggggtccgtgtgctcctggagctccaaagacacacaggggtccaagagccaccacggataagttatcaagtcacacaatcaacattatagctgaggaaaggactttagttaatcacacttctggattacatgtggcaattttaaaaatttaccagggctgggctgggcgcaggggctcaagcctgtagttccagcactttgggaggccgaggtgggcagatcaggaggtcaggagttcgagaccagcctggccaacatggtgaaaccccatctctactaaaaatacaaaaattagccatgcgtggtggtgggcatctgtaatcctagctgctcgggaggctaaggcaggagaattgcttgagcccagaggcggaggttgcagtgagccgagatcgtgccactgcactccagcctgagtgacagagagagactccgtgtgaaaaaaaaaaaaaaaataccaggtctggtttttgaaattctttctccgtattaaacaccaaaacttaacatatagtttactttgtgttaaacaacaacagtatggccgggcgcggcagctcatgcctgtaatcccagcactttgggaggccgaggcaggcggatcacgaggtcaggagatcgagaccatcctggctaacacggtgaaaccccgtctctactaaaaatacaaaaaattagctgggtgtggtggcgggcgcctgtagtcccaactacttgggaggctgaggcaggagaatggcttgaacccgggaggcggagcttgcagtgagccaagatcgcaccactgcactccagcctggtcgacagcgagactccatctcaaaaaaaaaaaaaaaataccaggtctggtttttgaaattctttctccgtattaaacaccaaaacttaacatatagtttactttgtgttaaacaacaacagtatgttttaaagcaagtatgtctttatttgtaagcatattactgaaacgatcaaatgaacagaagtggataaacgtcgagtcacttggctgagatcatacgcatcttccgtactgcttgtattaggatgcaagattgaatgtgtcttttttttaaaaatgcagccttgtgttgcactctgaaataagtgatttaaaaagaaaaacatgatacagagatcccatcctgaccttggaggcttggataaagctgtggggagacagcctcatggtccagccaggctagtctgcctgcttcaggactctcaagatctccccaagactttcaggatcagctgctgttaatcaaacaagtgcttataaaatggaaattgggacaaaggaaatgttaaatttcctccctgcaaccaggcagatgagaaatatggaaataaggaaaagggaaaatgaagatatgacaaagttgatgaaaaggttgaaatagtgatttatacatgatgggcaatcaagtgccccttttgccctgttttttggagagggtgtatcattgcctcaatggtgcgtctgcctgcactgagggcattacacatggctgactcgacctccctgcctctcacactctgtgtattttgtgaagctccacaaacggggtcacgtcatccaggtgaggccaccaccggtacagaaacctctcggcaatggttcttagccagggggtgactttgacttcacccctcgcctccctctccagcagctcccacagctcctcctgggacaggtagaggatgcttttcgtttcactgggatccgggttcagagtgacgtttttcctcacaagcagaaggtaacaaatttcatgctctccccaaattctgtctgattttgccttgtggtgatagattgtcatgaacacaatgtcctctggagaaatctattgacagaaattggtgcagtgttaacaacgctaatgtaaaacacagaatttacagaaaaatagagaaaataaacacatttgttttcctcagaaaatgaacactttctttggtaattgataatttccaaaacctcaattttagctaagtaaatttttgtggactcaagtctgaatgataaaccggctttggtttcttggttccagtaaacctgtctgtcttcatttaaagaactaaccgtgtcacacacacatcctcaacagaaaaccccgtagaaaccggctagcgttgtcaggagaacatccatcctctcttaaacgtgttcttgagtggatgaaggtaacacatgctcacaggatcctggacattctttctacacttgaatttctttcttttttttttttttgagatggagtctcgctctgtcgccaggctggagtgcagtggcacaatcccggctcactgcaacctctgcctcccaagtagctgggattacaggcgtgtgccactacgcccagctaatttttgtacttttaatagagacggggtttcaccatgttggccaggatggtcttgatttcttgaccttgtgatccgcccgcctcggcctcccaaagtgatgggattacaggcgtgagccaccacgcccggcttgaatttcctcttcggtgtgtggtcgacagattcctgcacagtctcaaccctgcctgggacacatagggactcacactgccccatccacagctacattcacagccccattcacagccccattcacagctcattcacagccccatccacagccccatccttcatcctcatggtgcttcatgaggtcaatggtgtagatccagcctggactttgttcaccgtctgcccgctgccaacctggactcccgtggacacagctgagactggatgctgtgtgtacctgctccccaggaattcccagctctgcttgcagacgcctctgggctgccctcctcactccgatggcatccttttcttccagttctgctgggttgtataatgggtggctactacaggagtcggtaaaataccctggaaaaaatgcatgtgggaacatccctctttattcctgaaaagtgaatatattaaatacaaatgcagatgcttcatgtaaaaccatcatccgtcatcagcagaagacagcctggcggggggagtgggtttgtcatgggctctcagagcagcactcgcctccagcctccacggctgtgggcttggtgagggtcttccacatgaccacctggcggggctggccctgaccgctcctgcggcccttcctgcagatgtgcacacacatgtcccgtggcactatcccagtatgtcttaggagagggactggttcctactcagttttgtacccacagaggacctgagatgccatggggtggcgggaggaggtggtggggctgtgggctgggtggctgcaccagctgggctgaggaagctgggctgcactttgagggtggtgatcagtgagcgtggtttcacaggaagactgctggaatacctttgaccaagtttccttactgagaggttctacttaatttacccaagtaacagcaatagcgctatgacgggaggtcacactctcctcagtaaatctctgttccctctcgttcctcagaccctcagtgcttccttcggtcactctgcaaggagtttggctgaagttgaatccactcttgcaagtacaagagctggtactcccacctgcccctatgtatcctggaggcggctaacacatgataggaaatcttagctccaggggctttatttgcaaactgttgactatgtactacagttgaccctcttaactttgcagctcctgaatttttctgaaacaaactttgcattcagctccatcaaggagcccgtgagtacaacttgaccagcaagtatggtggtgggtttgggaatgggcaggatgtacccactgcggctccgaggaagaactaagggaggagaaaacctcggccacagctggccgtgcttagccattcgctttaatggctcaggcaaggtctggttttgaaaatttgaggacagcctaggccaaaacactttaaatgaccacaattgacgtaaatgctgttcccctctaaaaaattttttggccgggcccggtggctcacgcctataatcccagcactttggaaggccaagacaggcatatcacgaggtcaggagatcgagaccatcctggctaacacggtgaaaccccgtctctactaaaaatacaaaacgttacccgggtgtggtggcgggcgcctgtagtcccagctacttgggaggctgaggcaggacaatggcgtgaacccaggaggcggggcttgcagtgagccgagatggcgccactgcactccagcctgggtgactgagccagactccatctccaaaaaaaaaaaaaaattttaagttgtaattttaagaagtacaagataattaaaactctaagacctgtaagataatttttattattattacctagttaattttatgctaaatgctattttaatcccctaaatccttaggttgataaattcctctgcatttaagtaacttgccgttgcaaagaaacaacaaaacaaaaaaacccagaaactcatatagtttcttacttttttaaaaaagaaaacccagcctactgaagagctatcagcataattagcatctgcctaagctgccgattttctgcaggatgagctgccagctcaccacagtgcggcactgagcaccagagagttcctgtcccagattcctccggtcaagtcacatgagatgctctcttcagtccggggcttggttgaacggactcaccaggaaaygtgactttygtgtccgacctctgctgtatcaggattcgattcttggtgttaaacaagacaacgctgaaggctcggtgcagcagccctgcaaaggtaagtgcmatttgtrtgagtgcatgcctggagtctgtaygattgtscttcgtgctttttgtcctcagtctgtttctcrtagaaaagcctgtgattgtggcacctgggcagggcaaaggggactgytggatgcccaaacacaacgtttcagaatctcagcggattagaacactcgggaaactaaaaatagatctaccagatgacccagaaatcccactaccagggcaaatatccaaaataaaagagatcagtctatcagagagatatcgcagcattcctgggtgctgagcaccatttacgacagccaagatatgagatcaacctgtgtccgtggaggtttgaagggttgaaaacatgagggttagatacacagtggcataccattccaccacaaaagaagaatgaaatcgggccgggtgcggtggctcacgcctgtaatctcagcactttgggaggctgaagtgggyggatcacgaggtcagaagatcgagaccaccctggctaacatggtgaaaccccgtctctactaaaaatacaaaaaaattarctgggcgtggtggcaggtgcctgtagtccaagctactcrggaggctgaggcaggagaatggcatgaacccaggaggcagagctggcagtgacctgagattgcaccactgcactccagcctgggcaatggagcaagactctgtctcaaaaaaaaaaaaaaaaagaagaatgaaatcctgtcatttgtagcaacatggatggaactggaggccattgtgttaagtggaacaaacctggcacagaaaaacaagtatcacatgttctcactgctatgtgggctctaaagaagttgatctcatggaggcagaaaacacaatgctagacaccagaggctgcgaagggcagtggggagggatgacgagagggtggttaataagtataaacataccgcgatagagaaggaataatatcagctgttcaatagcacagtagggtgactgtagttaacaacagtgtattatatgtttcaatgtggctagaacagaggatttggaatgttcccaacacaaagatatgatgaatgtttgaggtgatggatatcccaaaatgccctatttgatcattatgcatgacatggtggtatcaaactatcacatgtaccccattaatatgcataattattatgtgtttataaaaaagacacaaaaatgaaaattaaaaaataataaaatggcttaagatggtcaaagaaaaccagagctggacaggagttaaagcagraaagtctgactttactgagaaccatttcaataggggaaagagacctccatggagaaccagcctaactgcacacaacacccaaggagcaggctggggcctatggattaaaagttactaagagaaaacatcagtgggaagggggttctggctacaccgacctaacaagacctgctgaagacaggcctgcgtgatcagacgtcacctgggagggacggggttgaggaatttaatcagatgccaaggtcagggttctcgctaaaacaacctggtagaattcttgctgaaacaggatcttacgaggaagagcacggatgcctaggagaaggtgcaggagcctgacaagggcttgaccaagcaaagacgtcatccagrtgctgctccccgagccttctaaagacggcacagcaagcacacaggtgacccagtggtcgcctcctagccggaaaggcctagactctcttcttaggttgcygtcgggtgggaaaaatgggaaaaccctgggaactggacagagaaaatgggcgggggctacctttctcaatgttttygttcagatggcaattcctcttggtgtcggcaccaataaccttatcattctcatccacaacaatcagcatttcctccaagcgctgcaactgacgcctgtcaacccagtcaagatttatgtcagacatagctgctggctgtgacccgacctgaaatagatgcacacaaatgcctstttatgtgaaagatattgccatctcgtttttgctatgtgttaccaaccacattaggatttagcatacaccttctctacaagtgacagcaattgtgttgaagcagcacagttctgagatatggaaggtgaatcatctgtttctaatgtggtgtctctctgaacgggaaatcttgggtacatacatactcctcatgttttccaggtttcctttagtgacgagttaaagaatccccgccccaccrcacacacacacacacacacacacacacacacacacacacacacacacacaaaacacaccgaggtaaactgtaggtaacactctttgtacaagtttttggggaaaagtgcagccctgtgcaaaaccactggacctggatcagacgtggagaaacacacagccttgtaggaaagctacgtcacccacagaagggctatggtcctcttcagagccaagcagattcttaggtgaagatcttctcacaaaatgttttcagggccaggagcggtggctcacgtctgtaatcccagtactttgggaggccgaggtgggaggatcacttgaggtcaagagtttgagaccagcctggccaacatggtggaaccctctctctactaaaaaatacaaaaattagccaggcctggtggcacatgcctgtattcccagctactcaggaggctgaggcaggagaatcacttgaacctgggaagcagaggttgcagtgagccgagatcgtgccattgctctccagcctgggcagacagagtgagactctgtctcaaaaaaaaaaaaaaaaaatgttttcagggtcatttatcttcatgtaaaaccttctcatcatccttttctactttttaaaaaaatgcattcacgtctgtccattatcattactgttaatattttcacatctgctcctcctctttgcaaaaggctgtttgacttaatgcatggacatgagatacaatagaaatgcagagaaaacaattactgaatatgtacaaatttagatcataaaagaaagaattcccacaaggtaaaacatatgcactaacctctcttggaagctggagactcctgggtatcagatgtggaactcaatgtgcaagttgaaccagggcccttttataccctggggatgtagaaagatatcagctaaggcaatctgatatttttgtattcttaacaagaaaacacaccccggtctctctctatctctccatctctttctctctatctttctccctctcaattgagggataatagaaaattgttttgacacaatctcactttaaaaaatgcttttagtttttaaacctagggtaagttattttctactctatggctttctttttttttttttttttaaggtgatgtctagctctgttgcccaggccagagtgcagtggcgtgatctcggctgactgcaacctctgcctcccggattcgggcgattctcctgcctcagcatcccgagtagctgagattacaggcgcccgccatcacgcccagctaatttttttgtatttttagtagagacgaggtttcaccatgttggccaggctggtctccatctcctgacctcaggtgatccgcccgcctcggcctcccaaagtgctgggattacaggtgtgagccacggcgccgttcgatggcatctttttaattcacttgctgtatatatcatcccagattttaaaaagaaaaaataaaggtggcaaatggaagagaaaaataataaacattgtgactaaaattactgaataaattcttaggatagctgaaaatcgataaataaatgcaagaccttggaaaccaatgtgtttggaagagctaaaaaactgtataatttcttgcctatcatattccaaatatcatctaccaactaaagctctaggccaaatagttttgcaagtagggtctcttaaaatatcaaaaaaatgtttgccatatctgtcggttctctcagggaatatgaggagagaagcacgatggacgcatgactccgctgactttggcacggataatacagaacaaaaataacacagcagcagtgatgggtaatattctataaaaagattaatgtgttttgctcttttgtctttccataagttcacctttatgcatgtaatttttagttacgtagaaaatcaaaaggctatgcctgaaatgttttccctggaaatcagttctgagactcaggaataaatggtctgtttgaaacttgtttcttttgcagtcagaagagtaagaatgggagaatgatactcttttaaagatctaaaaaataataaataagtctatgaattaggctttgaggaagaaactaatatacaataccgtacctattataatccaacaactctaatagtaataataataatagtaagacagccagacacacattgtgtccttcctttgtgccagtttctattttaagagtttaatgtatattaattcatttgatcctcacgacagctttctgagataagcgttattttttattatcacagcatcgataaggaactgaagcacagagaggtaaattacctgcccaaggcaatgtggctgcagatgcagctgagcccccagaatctgtgcagtttaacatgttgggatcgtcaccaccaaactaagcactgaaagctttagaggcaaatgttatcaaaatttcaaggaaggaattgtcattctctgtaaaatgttctaggggataaaaaaggagggaaaccctttgctaggttgatctgggtacaaggttctgacacataaagcacacaaaaaacattataaaggaaaggaaggaagacattttgattaggctatatgcggagaattttcttaagagaggttatgacaactttaagaatgacagttgatgacctataatgctgcaggtaggaggttaagaataaactctaggaatagatgattacatctgattaaggcaaattagaagcaacagaaagggctctagatatcartgaaatatagagaaggacatggaggccaagactgggaaaagcaggtaaaaagaaatggaagtggaaagagttaaaaaggagtaggccaagtattgtaggtatgaaagagagggtaaaacaaatacagcatgtgctaaaaggggtatccttgaacaagagagccataataataaagaaaaatatcccagacacacaagatgacttaaacccacagatggaaagggcttgccatgttccagaaatactgacacattatcgtcgacactggggtaaacttctcagatctctgagaaaactgctgcatgcagaagagaacagccactcccaacaccatcactccatctcctaggcattgtacaaccctaatcctctgctttccacctagaatgatgggtgatccatgtacttaccaaaagtcacttcttgggtcaggtgtggtggctcaygcctgtaatcccagcactttgggaggctgaggcgggtggatcacctgaggtcaggagtttgagatgagcctggtcaacatggtgaaaccccatctttactaaaaatagaaaaaagggccgggtgcggtggcttatgcctgtagtcccagcactttgggaggccaaggcaggtggatcacgaggtgaggagatcgagaccatcctggctaacacggtgaaaccccgtctctactaaaaatacaaaaaaattagccgggtgtggtggtgggcgcctgtagtcccagctactcaggaggctgaagcaggagaatggtgtgaactcgggaggccgagcttgccgtgagcagagatcgctccattgcactccagcctgggcaacagagcgagactctgtctcaaaaacaaacaaaaaacaaaaaataacttcttctgcagcagattcacccacagtcacctactcaaagacatcgtccagcaattttccctttttcttctctatcatcacgttttctctctctctgttggaattctcctatcagtctgcaagcatgtgactatgatttcatttaagtaacagctagttttttagacctcatttgcccagcaagctactcctttgcaggaacactcttagaaaacttccttcatgctcactatatccagttcctttctctaatatttctcgttccttttctcacgtttaaaactatcaagtaacttaacctaaattgttaagtacaattgttgagctgttcarattttcaactcctgtcaacaaaattccaaagaacaagcttctaagataagcacttcctgatatttgataacataggttaaaatttctgtaaatatcttaagagattatactcaaatccatatgttggaaaacggtgatgaataaaattttggcagtgaggaaaataaaaataactttccataatagggttatttttatctatataaatcaagaaagaattaacactttagcaatgatcagaaaagatgaggcccttggtattactgggaaaatttggaagagataattaatttgggagagcttctagaacaagtactcagaagtgttcaataataagtaaaatgacacatatgtaattgatgtcttaaggctgatgacagcagccctcctaaatgaatctgcagtttgctactaaatccatacaattcgcctcctctaatatatacgtattttgagacggagtctccctctgtctccaggctggagtgcaatggcatgatctcggctcactgcaacatccgcctcctgggttcaagcaattctcctgcctcagcctctcgagtagctgggactacaggtgcacgctgccacccctggttaattttttttttgtattttagtagagatggggtttcaccactttgcccaggctggtctcaaactcctgagctcaggcaatccgcctgccttggcctcccaaaatgttaggattacaggcgtgagccactgcgcctggacctcctccaatatttggccaagccacgcaatctttaagctcccatgtctgtccatgattgtaggtttataatttggaacttcggttatttaattaattaaaaatattcagatatatcctgcaaataaatacaaagtttttgtactcagcatckttagtgcactttcccacaaggagttgtatgtaaatgaaaaaaatagataaatgcaagcatgtaaatcaactcctattattaaccatttacttagctcaagtttatttacacctgaatgaaaagttccatttgcatcaaaaatacattcgtatactcttaaggcagtgtccggcgcagcggctcacgcctgtaatcctagcactttgggaggctgaggcgggtggattacttgggcccaggcatccagcctggacaacaatggcaagagccatctctacaaaaaatacaaaaacttagccaggcatggtggtgtgcacctgtagtcccagctactctggaggctgagatgggagaatcgcctgagcctcagaggtcaaggctgcagtgagctgggattgagccactgtactccagcctggattacatatatttgtatattcctaaggcacataatggacytaggtcaccaaaactaaaagatattctagaccaaaattttgaatgtaatttaataaccttgtacaaaccctctacagctgcacattaccaaagctagtatcactgtacctagtggcttactgcctcattcaattgaaaagatcaaactaattcaatcctgctctccaaagaacactttttctgaatgggctctcagacttttcctgaatgggctctcagattctgctttcctargaaagtgtgttgaggtagttctttttctgaatgggctctcagattctgctctcctaagaaagagtgttgaggtagttctttttctgaatgggctctcagattctgctttcctaagaaagtgtgttgagctgtagttctacagcattgttcaatgcaaagatagggttggctgtaggttttcagaaggtgacctttatcaggttgaagaagttcccttctcgtcttactttcttgagattttatcatgaattgatgttgagttttgtcaaatgttttttctgcatttctactgaaatgagtcttgtgtggtcttttcccctttattctagcaatatggtgtatcatattaattgattttcagatgttaaactagccttgctttcttgaaataaatcccacttgggcatggagtatattctttttatatgttgctggtttctgttaatattttaagatttttgtatctggattcgtgattgataatagttattcttgtaatacctattataaatagttactgtgtggcttggccaaatactggaggaggtgaattgtatggattcagtagcaaattgcagattcatttgagagggctgctgtcatcagccttaagatatcaatcacactgggcgcagtggctcacacctgtaatcccagcactttgggtggccgaggtgggtggatcacaaggtcaggagttcaagaccagcctggccaacatggtgaaaccacatctctactaaaaatacaaaaattagccaggcatggtggcaggcacctgtaatcccagctactcgggaggctgaggcagagaattgcttgaactgaggaggtggaggttgcagtgagctgagatcgtgccattacactccagcctgggcaacagagcaagacaatgactcaaaaaaaaaaaatatcaatcacatatgtgtcattttacttattactgaacatttctcaatagaaatctttttgctatatttgagatatcccgttttcttctgcatatgcttttgggaggtaggataactaaaaatattatatataaaatataaaataacaatatataaaataactaatatgataactaatataactatatatagctatatatacctacatataactgcaatataaccataatatataaaataattaatataacatatagattagttataaaataatatatataaaactaataaaataacaccaatatataaaaaatataaaataactaaaatacattggtatagtttcttgtaataaccaaaagaaagtgttcctttttcctctatttcttggaagtgcttatgaaggactggtaatatttcttattttttattatttttgagacagagtttcgctcttgttgtccaggctggagtgcaatggcgcgatctcggctcactgcaacctccgcctcccagtttcaagtgattctcctgcctcagcctcctgggtagctggaattacaggcgtgtgccaccacacccggctaattttgtatttttagtagagacggggtttcaccgtgttggtcaggctggtcttgaactcctgacctcaggtgatccgcccgcttcagcctcctgaagtgttgggattacaggcgtgagccaccatgctcggccaatacttcttctttaaatgtttggtagaactcactagtgaggccactgggccttgtcttttcttcatgggaagattttaattactatgccttagctgggtaatacaaagatgtacctgcattatttcggattttcatcatttgtgcattctctctgttcttcttgatcattctagttaatggctttttccaactttgttgctcctttttttttttttttttttttttgagacagtctcactctgttgcccagggtgaagtgcagtggtgcgatcttggctcaccgcaacctctgcctcccgggttcaagcaattcttgtccctcagccccctccccctgcctgtccctccttcctcctgctgagtagctgcgattacaggcacacaccaccatgcccggctaatttttgtagagatggggtttcaccatgtcacccaggctgctctcaaactcctagcctcaagtgatctgccaatcttggcctcccaaagtgctgggatcactagaagcttttcaatttttttattccaaagcaatctgatgcagtttttgctatatttgagatatctcattttcttctgcatatgctattgggagataggaaagattttggaaaatgtgtaagaaaaaggaagatactaaaaacatactaagattgtatgtagggaaaggttacamctctaactttgataatgtgcattaaatcgacaaatccttgaaaagcacagctcgataaatccaacaaaaggagaaaaagaacatgtgaagagttgaatatatgtgaaagaaatgtaagttcatttttctttttttttttgagatggagtctcgctctgtcgcccaggctggagtgcagtggggcgatctcggctcactgcaagctccgcctcccgggttcacgccattctcctgcctcagcctcccgagtagctgggactacaggcgcctgacactccgcctggctaaatttttgtattttttagtagagacggggtttcaccgtgttagccaggatggtctcgatctcctgaccttgtgatctgcccgcctcggcctcccaaagtgctgggattacaggcgtgagccgccgcacccggtcgtaagttcattattaaaatgggccccatatccacgtgaataggggtcagtctcagacttagctttaattttcagccatgagaagactactgctcttcctccaacactcacttctctattttctctatcgtttgatcctgtctcctgtacaactgggtggtatttaaccrtgtttaggctcaggtataacccaagctctgaaactgtaatagaaaattaagtaaatgaaaggcaaaaaatgaaagacttaataaggtttaagctgttattcatctaggaggctgaataacaatacatatacatgtttttgttgtttatgtgtatatattttttatgaatagagttgttcctattatgttgtatcttgtaataattaytaatgacaaggttcataaatagctagatgttaacataactggccaaactccagtgacaagggccctgttacaatcagtaggaccaacctgctaagacctgagctcagagctcagggatggccaaggtcaaggcccagtggttgtgacgagatgccaggaaaccttacccactgcatgcctgtgttgtgccatggtgctgtaagtagtctctttgggtacactgccagtaggcttttggcatacatgtatgggctagtattttcaggccaaaaaactatccctgtctcattgtttactatttttgtgcagcaatttggttttactgttggttcttactctggtcttgccccaagttcaatactttggttcttctcttctccctaaactttccctgtcctgattccctgagaacaattcccttttctctgaattgggatcctatttctaccccttgcatacatacccctcctaattcttctgggtaaatttctatgcccattaactctagacatacatttgtaaattactgagaccctaaattgagaattatgtttgccattacttttaaaagtgtaatctgaatcccagcactttgggaggccgaggcgggcggatcacgaggtcagragatccagaccatccagactaacacggtgaaaccccgtctctactaaaaatacaaaaaaattagccgggcgtggtggcgggcgcctgtagtcccagctactcagaggctgaggcaggagaatggcgtgaacccgggaggcggagcttgcagtgagccgagatcgcaccactggactccagcctgggygaaggagcgagactccgtctcaaaaaaaaaaaaaaaagtgtaatctgtttttttgcctcctgaaatcacttatgtataaacacattaaagtgggtcaccgtgtcacgtcttgggcttcctgggacaagaatcaaatggcacatgcctggccaaagtgctcagatcaatctgcaaaccatggtcacagagccagtcacagagtcttacggctttcattgtagcttctctgtggaatatcttcaaggacatgtgtgtgctttaggatgttcacgtgtcatgattaagttgtaaatttcaaaaattctaagaatgcctattgttggccagaagtataaaaattggaaagattttaataaaatcatctttcaatcttacttaaataggtctatgaagtctscatctcttcctctggaaagtaacgtaagggctgtgaagaacattgtccataatgaaactgagaagggctgttctccctgggaacagaaaggtcactgtctttgctcaacaaacagcctaaagccaggaacgcaggcctccccaggcctcttggccgcctctcaagcttcctcaataaaaaattcacatggaagacattctagtctatcttctcttccttctttcttccctttagctaataattattgagtgctgattatgttctggacacagttctagaatttctgtgataagaaacagagaccccagcagtgattctctgctggggccgatggctctcagggacatccttcaaaacagggcccatttggttctttaaaaaaaataatgtccagtttctctaaaaattctgtcatgacttttatttctttgatgttaagctttgtgtcttaggtttcagcgtgctgacrttctctgggccctgaagtcactgctgctggctgktgtgctggccacttggtcgtgctggcctgtctcccaccgggtggatgcccagcgagctctggatgctgtgtatgacaaagacatgggggttgtttggagtctgtgatgtgctattgtcctccacataatggttttctgcaagaaactagagaagtaactatctcagatttccctaataaaaacaggttttgagccaattccaggctggccctaaattcctcttcctagcacgtgaagcctgggaagctctccgtgggccttgccctcgcagctctcacccctggtctctgctcccccattcctgtctggctattggaagcacctctccattgcccagcctctctgctcatttactggaactgggcaatgccccttgggaaaagcagcacaggttttcttctcctagattttgccctatgcttcttttcagagctatttggtctctgacattctctctcaggtttttccagcgctcttgggaggtgggctgtgccactgcctggcccacctggcccacctggcccaccattacctgaagggaagcatgaacagcctttgacgtgggagtggcgactgctgagagggaactgtctgtacacaagcaatgtagccttatgggacctgtgagtatatgcttaagttttttttgtgttttttttttttggttgagatggagtctcgctctgtcacccaggctggagtgcagtggcacgatctcggctcactgcaagctccgtctcctggattcacacaccattctcctgcctcagcctcccgagtagctgggactacaggcacctaccactgcgccctgctaatttttgtatttttactagagatggggtttccccatgttggccaggctggtctcaaaactcctgacctcgtgatccgcccgcctcgacctcccaaagtgctgggattacaggcgtgagccactgcgcccggccaatgcttaagtttttattcataatttactcaaagtcactgagctcygacttcatgctggtgattcagatttgagtcctgggaagatcatctgagatgacgttyaagccaagggtttaaatgagtcatattcagccaggtgcagactmaggcagtgcaggttccaggcagaagggaaagcacgtggacacgctgagatgcaggcaaggcctcacagccagagctggcttstcacctggcgtgggaacacctttcctcttcagactctgtgwgttccttttaatctgcgtcagggcatgtgattgagcagcaygygaccaaccccactgcggcatctgtcccccgtggggtgggggtggggacagagttcttttcctacagcataagtgtgtcatgtcaaccaacgccgtgtcagctgcctgcaggggcccacgggcatggggacccgacgtacaccgtgggagctgaccttkctttcttctctcaggagtggagccccaacccacgcagggcgtgtcttcatggcttttcctggccaatctgataccaagatgcagtggccagaagtacctgcacttccactcctgtcaaggtgagatgccacttgctctccactgattctctatcagtgctgagctctgttctstagagctcacggattctatattgtgttaagctgtcacttaaaagtgcacaaattgtttcaatcaatcctaacatattcacccaygtaattaacaccctatcaacatagagaacacttcgaaaatcacaaggctccctgcgccccctggaagtagcttctattcttgcctacatcttaattggtttcgcctgtttttgacctttatttcactggaatcacgtatgccttttgtatccggcttcttccactcargattgggtctgtggatttactcacactgctgtgtatagcaggactgctcccgcggcatggcagcatccgattgtgcagacaccaaggctgatgtaaccactgcagatgttctgcaggggcgtccctgggatagagactggacatgtagcaaagagctccgtgagygtgagcgaggcaagccctgaacccacactgtatcacctacttatagggcagtgcataaaaatctgggaaacaccttgtttctcaaagtaacaacgaatatgtcagtgacttcccagcccaagaatatgctgcattcgttcgctgcttagttagtaaaatggcaacaaaagaaggcagaaccacgcacatttgtctcctgccaggtctgactcgtttgactttagtagatagtggccaacagcttcatggtagcaggcatgctcagaagcagttactttatattccgtcaacacttggtgatgttggtcttttmaattcgggtttcaatttgcacctaccctgtgattaatgaggttaagcttcttttcatgtttaacacccaaattttaatagactttattctttcgaccagttcaggttcacagcaaaattgggtggaaggtagacagtttccataaacccccagcccctccacacacacagactcccccactatctacatcctcatcggagtggtccatttgttacagccgatagacgtacgtcaacacatcattatcacctggagtccagtttacatgaggcttgctcttggtgttggacaaatgcataatgacctatatccaccaattcagtaccatgcagaagagtttcactgccctaaaaatcctgtgccctgcccactcattcctccctcccctgtcacccctggctttttactgtttccagttttcctttactggaatgttggagaactggactccttcaggatgtagcctttcatgcttctttcagcaacatgcacctaactttcctccctgtctttgtggcttgatagctcatttctttttagtgccaaataacatcctactgtctggatatatcagtttacttatgcattcacctatatgcatataaaatagaggagagaatgcggtgttggagatttacgtttgggagtctaaaccatgtatggtaaataagtataatgtgtgaaaattgtaaagcagaaagctgtcaggatacctgaatacacacaaatacacacttcagttcaygctataaaatgttataaaatgtgtaagtacatacttagggctgaaaaagcacccagagaggaagggtgaagaagaggtgtatctgaaataataaaaagaaaatctgtcaagaggggatctagagtacctcatcccatgaggaactcccaaccctagtgagggtccaacggacagatccaagtgagaggatgaaaccactgcacaagcaccccctaaggggcaggtggagggcagttcccacagggacccacttcgggtacaacctgggcttgtccccagggagcaggtggagggcagttcccacagggacgcactgcgggtacgacctggacgtgtccccagggagcaggtggagggcagttcccacagggacgcactgcgggtacgacctggacgtgtccccagggagcaggtggagggcagttcccacagggacgcactgcgggtacgacctggacgtgtccccagggagcaggtggagggcagttcccacagggacgcactgcgggtacgacctggacktgtccccakggagcaggtggagggcagktcccacagggacgcactgcgggtacgacctggacttgtccccagggagcaggtggagggcagktcccacagggacgcactgcgggtacgacctggacttgtccccagggagcaggtggagggcagttcccacagggacgcactgcgggtacgacctggacttgtccccagggagcaggtggagggcagttcccacagggacgcactgcgggtacgacctggacgtgtccccagggagcaggtggagggcagttcccacagggatgcactgcgggtacgacctggacttgtccccaggtgccagggccaagtaagaagaaaatgtgccttccttcctattataccattttctgttttggtcttgttctcttgataatataggtagggaaacagaatcagcaattattagaaggccacctctactttgtccttaaaggagttggcaatggtttgaccagaatcaaagaagtatatattttgaagattaagagtttaaaacagtttaagaaaaaaaaaatttataggtaccatttagctttctagttgaaaaccaacacatctgcctttggggtcagaagcagctatatctaggagagggatactcctctttataaaagatgaaggagttctaaggagtttatcaggtcaaaagacattccttacattttctggatggcatcctagtaatattacaacagtagtatctaactcttgctaagtacttaacaaggtgctgggtagcagtctaagggtcccatgtccaattcagtagccatggcaactcatagttatcacataactaattatatgtggctttcagcctaaaacttcctagaaaataaaactaaaaaaattagaaacaatattataaatgcaacggaaactatacaggcaatatcctattagtgtatcaaaattttaacaaactaaacacagtattaaattgcaattttttttacttttcaataaaatacttgctaaacagtcttgtctgaaattataaattgcccaaagttaaccataaatgagtcattctattgaatttaacaaacatttaactttgcaagaaataaatttttatttttcttcattatcatacagcatttaagaataataaatctgtcttgaggtttcaaatctgagatatctatggcaagtttataaaaagtacattgatcaaggtacaatttttaacattaatatacayattccataatctcatctatttaacattaacacaggcctttgttgttgttatttttttctccctacaatatttcctgactctgtaggacagtggtcctcagttgggggttgactctgtcccctaggggcatctggcaacatccggcataactgtgggtgtcacatgagagggacgctgctcaccatcctgcaatgcacagcacagaccccaccacaggggttttatccagcccaaatgtcaacagtgtcaagtttaagcaactcttaccgagtgggactcaattcccattttatgaacacctctgtgctcactgtaattctgaaaacacagactttgctaactggtaaatactatttacaagaagattcaacctaatcaatatcacttatcaaaagcagtggctgactgtaagtatcaacatgtttccagaatgaataaaccacacaatcaactcagaatgatacaaattagggtccatatcatttaatttcccttgaacctgctctgctagtttaatctgctaatatgaaagttaattaagactgttttgaaggagcgagacaatagtttcctttgcacatttttctgaactatgagaaaaatttaatgatacataaagcacctggcaaatagcaagtcctctgcaagtgctccggaaatgtttatcacagcctactaaaaacacagagtttcactcatttgttcaaatttcccataagtatgtatctgcaaagattaaattaagttttatttgctcgctctcattttacaataatctctcacaaatgtcgcttagaaacagaacacatatccagggtgtgtgatacaaaattataagttagttttttccacacaagttttaaagtatcagtgtatataatacattaatgatagtaccaaatgatagaactaaatttaatgataaattaatgatagaactaaatttaaaaggaaaaagtcattctaagtttgttaagcagataaatttttctgtaatcatttacctacatattcacattctgtatattttctcatggtcaacaaactgattcaaatgatttaagttatcccaccatttaaagagaaaagtcgctgcaataattttaaaccatggcgttatcttaatttcaccactggctgcttttttcagaagttcttttagttcttcctttgacacataacaatagcttttaatctcattgggatctggattcaaagttacattcttcctcaccaacaaaatgtaatcaatttcatgttcaccccagataccatcagactgagctttgtagtgaattcgtgttaaataattaatttcttctggaggaacctaagacattaaaaaaaaaaaagtaattaaaacatcggccaccgtaacmaaaaaaatctaaaattagctcactgtattacagsgatatctcgaacagcagtmtagtyttaggattmgaacttggttaaagsattaatctcctatcaatggtatatggaaatcttaatattatatatggaaaaatgattacatcattagtttcaagtgtttgcgtttttttcccgatcagataagtttttttttttttaatgttaaaaaaaggggcagtcactcaaactagaaatgtgacattcttctttttcttcttttttttttttttgtgagacggagtcttgctgtcacccaagctggagtgcaatggtgtgatctcagctcactgcaacctccgcctcccaggttcaagcgattctcctgcctcagcctcctgagtagctgggattacagacgtgccgccccaccatgcccagctagtttttgtatttttagtagagacggagtttcaccatgttggtcaggctggtctcgaactcctgacctcgtgatccacctgcctcagcctcccaaagtgctgggattacaggcgtgagccaccacgaccggcccgacatttttctttttcatattttaaaattgctttttggaaaatatagataagaaatactttatttatccaggtcttatttaagggggacaattccaagaaaaaaaatgatttcaattaaaccaatgagatttatggttcatattcctaagagtttccatcagaaaatcttcaccttttttgtaggtggggagttttaggtgagaactggaaaacctgtcagttaaattctacaagagctgtaacacttgaaaatactcatcttagatttgatcaattatagaaatattcaaccttatatagtgcttaacagatcaatccatccccgtattgagctaagttttgacaagtgatattaagaaattaaaatttaaataatctttattcaagatggtttgtggggctaactcataactccggaggttaccaagcagagaactacatttgaatttaaaaattttattaaaaacctttttatagtatgtttaggtttcagcttgtatggttgtgtaggagagctggttacctcttccaagggaattcctagctcagctttcagccgtctctgtgctgctcgcctcactccaagggcgtcactttcctcaagctcggctggattgcttaatggatgactacaacacgtattcgtaaaacaacctggaaaatggtaatacagagacagatcaacttttcttcaaagkaggtctgaaagaycaagaaaaagttttataagtaactgaaaaatgaaatkatttttaaggattttaaaatcagttataatgggctatcagtaattattttaaggattttaaaattggttataatgggctatcagtaattattttaaggattttaaaattggttataatgggctatcagtaattatgttgtgaaacagactacatttgtaggtaggttccttattaatacttcttyaaccaaaaaagatcaaagtgtagataatacagattaaagataaatatgtaaattatacatattgcccaattgcttactagttcttattttttcttgctgttgtattaggttgcactcattgtgtaaactcactttatgcagaatataaaattatgccattcacaggatttycctttgtgaccttggctccaagaattcagaatgataaaaagtcaaattaatgtacaaacacaatattgtacattaaaagtgtactaacctggaaaggtaatcttagcatctgatctttgctgtagcagaagcttattttcggtgttgaataagaagacactaaaagctcgatgcaataatcctgaaagcaaaagaaataacaattattttagccttaagtaccagttatttgccaaattctctccctgcagttcagaataacattagtaacttgctgctgcttttgctttttcccatggtttatccacatgcatagtctctgcatggctatggtgaggaagagctctgcactgggcaaggaagttggccgtcgagtgaaggaaatggtgatgctggtggcccctttccggcagtcaagttccctatcaaggacattcagttctcggaaagtggtgaaggcacaygcttccctgcatggtgcccgcctctctccactctctagaaatattagaggctaggctgctgctgtatgtcagggctagtccctcttctatgaatccagaataactctgaagaagccgagtaacaggcatgaagtgaagagaaatcgctgtaacaggaagacagcaaagcagatgctaatgaccacactatttaacgaactggaaccaacgagaaaatacggtattactgaagactgcacttccttgaacagagtgctcttctcagcaaatcggaaatgcctacacaaatcgctttacaagaaagactgtttcaaagcagcacctttctcaatgttctcgttcaggtgacaattcttcttggtctcagctccaattttattgtcattttcatcaataaggatacacatctctgccaggagttgaacctgttgcttgtcgaggtggttagtgtttatttcaggcatcattacaaaatgtctgatctgttctagaacactaatattaaaggaaaagagaaagaaaggccatcatatatttttctgaatgtcatataaacacaggttaataatgatgctgcttccccatctgcagttgtaccactctgcatccccacagggaccccaagaacgctgccagccggctgctcagcactatctgggtcatcatttctcctacaggtttcacagctggccttttatcacagtcatgctcctgaaggccaagctcaacgttccgctctaaattcttgacctctgagatcctctgcagcacttgatactcaatcctttttccagtgtacttttcttctctggtttttggccccaacctaacttttcatcctgcttttctacaccagcttctgtaatctctagaatgtgctcccattgccatcctgaattgtttttcccactgcctgtctctgcatagttgctcaagattgccacaggccaatcttggttgaaatccattttttcaaggcacaactcgtgccagacattcaataacctttctaccaatgtcacagtaagacttaatccagtttttctcaacccaagctcctgggttatcagaaaaattatttgtatgagttttgtcaatttcccccaggacagtacttagctgatatcattctagataaacaggagaagacttaattcgttatattcaatagatgctttaaggcagtgcttggcaagttttttctgtgaagggccagagagtatgaactctgcctctgtaacactaaaatagtcacaggcaataggtgaactgggcagtatgtaaactgagtgtgggtgcatgccaatatttatggacactgaattacatttaattttcatgtgtcacaaaatattttgattcttctccatccgtttaaatatgagaaaaacactcagctcacaggacgtaacaacaggcagcaggccagatttggcctataggccatagttggcccattcctaccttagtgcatcaaacattaattttctgaacccccatttatccctcccatgtgattacaacgtaaagcacttattagggtactttcagtattctgactcacacttttacatatctgtatccagcagcgtctaagctttctaatctttgtatccttcagggcacctttacatagtctgaccttgaagttttttattcccttttttcttctcctttatttctgaatgaattataatttttgttttctgatttttctacccaatatattttgaagatcccatgtgctctactttctatgtgactctatttcaaatacatagattttactgaaatacttttttgtttctgagagggagtctcgttttgttgcccaggctggaatgcaatggtgcaatctcagctcactacaacccccacctcctgggttcaagtgattctcctgctttgacctcccaagtagctgggactacaggcgtgcaccaccatgccaggctaatttttgtatttttagtagagacgaagtcttgccatgctggccatgctgatctcgaactcctaacctcaggagatctgcctgctttggcctcccaaagtgttgagattacaggagtgagccaccacacggggaccactgaaatactttcaacagagttcaagcatactgcagaatgtacacaaagtgtttaaacagctacttaatacaaagttctagacccacatagggtctgggtgtgtgtgtgtgtgaatgcgtgtgtcaggagtcagtgatgatggagatattgatatctaatacaaaaaatctgaaataaggttaatgattaaaacaaatcaagagggaaaataatgtgaaaaggaagtcaacttcagagttagcctcaattttagaaagatttccaacttctataggctagttttatatacagtcatcctttggtatatatgggagttagttccaggacctcccacagctaccaaaatttgaggatgctgaagtttcagatataaaatggcataatatttgcagatcacctgtgtatatccactgtatacatacatgtgtcacatgatggtgtttcggtacactacagactgcatatactacagtggttccataaaattataacagaactgacatattcctattgctaatgatgttgtagccattgtaacatcggagcacaacacatcaccttttctatgtttagatacacaaatacttgctgttgtgttacaactgcccacattattcagcacagtcacacactgtccaaatttaggcctgaagcaacaggaaaaacagcctaagagcaactggctacaccacacagcccagctgctccactgtctgtctacaccacacagcccagctgctccactgtctacaccacacagcccagctgctccactgtctacaccacaccgcccagctgctccactgtctacaccacacagcccagctgcccattgtctacaccacacagcccagctgctccactgtctacaccacacagcccagctgctccactgtctacaccacacagcccagctgctccactgtctacaccacacagcccagctgctccactgtctacaccacacagcccagctgctccaccgtctgtctacaccacacagcccagctgctccactgtctaggtctgcgtcagcgcactctgcttccacaatgatgaaagtacctaacaatgaacttctccaaagtatccctgttaagtgatgcgggccgaacgttaaattatcatctgtagatgatctcttatagtatctaaaacatgtaaatcctacataaatagttgtgctgtattgtttacagaataagtctgtatatgttcagtacagatgaaatttttttccaaatattttataatgtgcagttggttaaatccatggatatggaccccaaggatacagtaggccaactgtatattaggtgatcactaagataggtttcgttactacataattactagactttttgacatgactttttttccggggggatggggctgggtcttgctgtgtctgtcgcccaagctggagtgcagtggcgcgatctcggctcactgcagccttcgactccgcctcccaaagtgctgggattaaaggcgtgcaccaccgcccagctgtaatgacaattgctctttcaggattttcagaattcagattttaaagctaagctgcataatcacaagataaaatgaatacgtctatttatgcgtttaaagaataccatgtagtagacgcgggaacacatcatccaacccaagaaaaaggtctagttccatctatgcgatgctccccatctcttctcctgctccattcccaggagaagcgccttgagtgtgttgctgtcaccctcttgcacggacgcaggtgtatgcacccgcgtcacacgcgtggactcggcacggggaggccggtgtcgtcacgctcgtgtttctgacgatgctgtctacgcttgtttctgaattctctaaggggagactcgcaactcttagtctcctgcgactcggtttccagttccacgagttcctaaacctcaggtgactgtgcgcagacgacgatcttttccgctgacaaagaatggcaacgtctctgacgccccgactcacgcctccgccttccacggggcgcgggcgcccaccacagcccgggaaggcccggcctccctccagttcgggagaccaacgccgccacccccagctgtccaggcctccgcgccgagacctcacgggtggctcagacctcgggcctcctccccgccccgtcccgcagctccccgatgccgccctgcccctgtctcccgaactccgccgcccgtccacagtacctgatcagcctccggccacagacaaccgccggtcccggatggcgcccgctttgagcacagtctgcggcgcgcaccgcccactggccccgcccccgggccgcgcagccaatcgctcgcgccagcgccagtccacgccacatcgcccggccaattggcgcccgtacgcgcttgacgacacaatctcgccaagcttcgcctggtggtgccacctccctggcctgtgacaacggcagacgcgcgaagcaccgggaacctgagccgtgaccgcgggctctggcgcctttaagggggtcaacacgccccacccccagttccgcagaggcagcgtcccgcgactgggcggtgcccgagaccacagacgccgccagccaatcacgctttcgatcctgccgtgcgagcccgaggcgctgcgaacggtgcctaacgtcagacgtctcgaggctcgcgttccatggaggaagccctcccaatccgaaagcgcccgggcgccaagccctgcagccggaagctcggcgtcccatgggagcgacctccgcatggctggaccaatggaaacggaggaaaggcgggacgtcactgctgactggctggttgggcactcccccccctccccccccccgagttccgccgctgggactacagcgtttggctgcacggggagttctcgtatgtctagaacgatggcctttctgcggtgtctgcgaccgggaccaaggcggagcaaagtcgccgggggtgtggggtgttccacgctatgttgggagtgttcgctttcgaggtacatgactacgttctaaattttttttttttgagacagtttcattcttgttgcccaggcttgagtgcaatggtgcagtctccgctcacagcaacctccgccgcccgggttcaggcaattgtcccgtctcagcctcccaagtagctggaattacaggcatgcgccaccacgcccggcttatttcgtatttttagtagagacgggtttccgcatgttggtcaggctggtctggaactcctgacctcaagtgatccacctggctcagcttaccgaagtgctgagattccgggtgtgagccaccgcgcctagccctctaaacttttaaataatcgtgaaatgtatgcgcagctgaagcgaattcagctatttcctctaccttttgtgtggaatttaaaatactgaacttgtgagatgaacctggtgggcaccagttctcaaacttcttggtcacaggacgcttgcactctcttaaaatgtactgaggacacctaaaagcttttgctcactgttgtttactactgctatttactaacatagaaattaaacatattaaaatattcacttaaaaaacacacgacactaacataagttatatttttattaaaaatcttttccagacaaaaaacagactttgattttgttttatgtgttgacagatctctttcatgtctggcttcacacagataagaaaatctggcctcccgcatgcgcagcaagtcctcactgctgtcagtgcgttcttgggaatcaggacttttaagtgaaacaacgtatagcaaaaccaattttaccagaggctaaaaaataaggattaagttcctaaagcatacttctggccaaggaaaaaaaaaatcactaagcttctaaaggccaaagtattctaatattaaacattgaaataaatgtgagctatacatacatttaagaaagatgaataaaaagataattattacttaattattccagttctgggtcatgtgtagctgaagcctgtttcagtagctcagggcacaaagagggaaccagccctggacaggacgccattccatcacagggccactcacacacccacactcagactgggacagtgaagacacaccagttcacctcacgtgcacacctctgggatgtggcaagaactgcagcacccagagaaaacctatgcaggtgtggcgagaacacgtaaacaccacaaagacagtgcccctggctgggagtctttttctcatcaatgttacaaagaaatgaatgagcacctgctgtatgcagtttgaaaattgagaagtattttttaatagccttttcaaattatcttggttattctttttcgatactactaccccaaaacacgagtggtggattttccaattactatttggaatttgaaaccacttcaatggacattttgtacttgttacattaaaactcat

SEQ ID NO: 6922 - DNA, 13784 bp, Homo sapiens
aactttttagtggtagctctaggttttacattatacatttacagcttattgtagtctactgattatcaacattttaccagttcacataaagtatacaaatcttactttcctctatgcttctttacctttccccatttataacgtaatcacaaatatttcctacacatacactgagaaccacaccacggttatgcttcaaattccaaacacaatttagaaaataaacgaatactaaattgaccgatatttttgctgtccattctttgttcttccctcctgatgttcccacatttcttttgtcatttcctttctgtttggagaatttcctttatttgttattttcatagagtaggtcagctggagataaatcatgtgaaggaagttttcacttgatataaaattctgagttgatagtccttttccttcagcacctgaaaaaaatgtcctgccacttccttatgccctccacaatttctgataagatccactgtcaggccaggcacagtggctcatgactgtaattccagcaagcgtgagggaggccgaggcgggcagatcacctgaggtcaggagttcaagaccagcctggctaacatggtgaaaccccgtctctactaaaaatacaaaactagccaggcgtgatgtggcatgcctgtaatcccagctacttgggaggctagggcagaactgcttgaacctgggaggcagaggttgtagtgagctgagatcacaccactgcactccagcctggttgacagagcaagattccatctcaaaaaaaaaaaaaaaaaaaaaaaaaaaaaagatccattgtcactcaaattgtttcccactacaggtcaagtggtatctctcttactatgcttctgtcttcagttttcagaagttggcctggatgtgtcttagcatctttgtgtttatcttctctgggtttatgctgcttcttacgtctgaaggtgtatggcttgccaagtttaggaaacatacagcagtgatttcttcagacacgttttccccccaccccgtccttctctctttctagacctctgatgacagatgttgcatcttctgttaaagtcccacgggcccctgaggctctgctcacttttttccagtctattttctctctgctgttcagattgggtaacttctattgttctatcttcaaattgacagcttcttttgtctgtcctctcctttctgctgctaagccatccactgaatttatttcacatattctatttttcacttttgaaattttgtgtttcttttttacatcctgtattttcttcctgaggctatttgtcgtttgtctcgaatgttaattggttattgaagcatttctacaatcgctgctttaaggtccttgtcaaataattctaaactctgtgtcatctctacgttggcatcagtggtcttttcttactgaggttgagattttcctatgagtgattttccattgaaatcctgacatcagactcaggatctgatgtaagtcttctgttagagcaggcctctgccaggtggatgtggacggtgaggtggaagttgagattcccactcagcctccacggacccctgcatgagaaggaaagttcagcctcctgccgaacttccactcccaccaccaaggctgaatcagggctgcctccgtgctgctccctatacagtctcccccacaccacaggggggtggcctcatgaccacagggcagcagtaaagttcctgagttttgcaaggtccctcttatgataccctagcagaaaggaggctgtgctctgtcaccacccagcagaagtaaaaccccaactcctcagccagtcttctctgacagcaaccctgcagagaggagcatctcatcccagcttgtcatgagtgggaatctgaagtacctgctcagcctctgattagcagggtgagggtggtgctgcagggtttcctgtgatatttagctggaggaaagtacttaccgccgaaaagttctctgattagcagggtgagggtggtgctgcagggtttcctgtgatatttagctggaggaaagtacttaccatcgaaaagttctgtgatttgtaggctgcccctttcctggtctttcagacacagagagcaggcttttcttgggccttgttttgtctgagtccttttatacctgcgctgctagcttatccagcacaacatatgagatacatgaggcaaaaagaaaactcacagaactaagtttggtgtcatttctgtggtcccaatgtacgaaggaagtctaccttcttttctccatctttcagtctctttttttttttttttaacagagtgtcgctctgttccccaggctggagtgcaatggcacaatcttggctcactgcaacctccacctcctgggttcaagcaattctcctacctcagcctcccaagtagctgggactacaggtgcccaacagcacatctggctaattattgtatttttagcggagacaaggtttcaccatattgaccagagtggtctctaacttgtgaccttgtgatctgcccgcctcagcctcccaaagtgcttggattacaggcgtgagccactgcacccggcccactcttacatttgttttatatatgtccagtgtttttagatgtacttcatgggaggaataaggaaaaataagtctccatctttccgcaagcagaaagccaagaatcatcttttattctcaaattgcatatgtgtaggcctatttttaaaggagaagtaagtcttgctttacaacataaaacagttactttgtagtttatggagtatgttttgtaaaggaaaaaaagaaaccacatcaaaagcctgtgaaagctgtcctgatatggcctcagagaaaaagggagactctatcttcagttaaatgaagcaaataaaaccagcaaagggtttcccttccctctcttaagaacttcatctgtagaaacattctgatgcattccagacattctacaagttcgttaccaaaaatgcagagattacaatatcacctttcctttctcatcaaaattataagttttggatcactgattttatctcactggctattccagcctctccgtaagttgcatggtgttctctttggtttagcttgctttcttcgccacttcacaaaatagtcaataccgccggcaatctttttctgctgatcaactacaaccaaatgtatgcatttcctacaatcacctccctggaacttggcaccaaatacagattttttcatactggagtaatcttatcatctctgtattcacaccctccacattttttcccagtgtctgtattggtcctatcaccacttccttcctttcacaccacatcctccatggaaactcagtccttggcccccccaaaaaaaaaaaagctcaagaccagaagtgtttcagaattcagatgctttcagattttggaatatccgcatatacatagtaagatatcctagggatgggacccaaggctaaactcaaagttcatttatgtttcatgtatacctcatgcacgtagcctgaaggtaattttttttttttttttgagatgacgtctccactgttgcccaggctggagtgcagtggtgttaacctcggttcactgcaacctccatctcccaggttcaagcaattctcctgcctcagcctcccaagtagctggaattacaggcacccaacaccatgcccagctaatttttgtatttttaagagagacggggtttcaccatgttggcaaggtggtttcgaactcctggcctcaagtggtctgcccagctcggcctcccaaaatgctgggattactggcctgagccaccacagcaggcctcctgaaggtaattttattttgccctaggggatcctgaataaactatgttgcgcacccacattttgactacaacctgtctgtcacaaggtaaggtgtggaaatttccacttgtgtcatgttatggattttgaatttttggattaggatgctcaaccggcgtagcataaatcttatttaaatgtttaatcaccagtttagggggttttcaggttggtatcatgggaagagggacaaggaagtggcaggtgtttgtaaaactactgaaatggtataccatggaatctaaaatagacaggaagggaagtgaaaacagaaagaattaatggagagatactggaagaaagttggtggactggcagatctaccagaggctgaagagctactacaaagaattgctgtaaggctcaaatggatcaataaatacaaagagtcactaatcctcataacatccctatgagacagagttcccaaatccaattaagagcctttcaacacagtcatacatcacttaaggatggggacaggttctgagagatgcatcgttacgtgatttcgtcactgtgggaacatcgcagagtacacttacacaaagctaggtgcacagcctactccacacctaggctagatggcccagcctgctgctcctagcctacaaccctgcacagcatgttactgtactgaatactgcagacaactgtaacacaatggtatctatttgtgtacctaaacatatctacacatagaaaaggtacagtaaaaatagagtattacaatcttatgggaccaccatcttacatgaggtctgttgttgaccaaaacatcatttgttatgtggcacccgattgtatttaacagactaaacactaataaactgattatagaactgtaaagagaaaaaacaaacttcttcactccaaatataaccttctttaacctctatgcactgttttacctaaatacaagcaaagagaaacctgagattccaaaacgtaattattttccttcaaaatattcacatttacccaatattattggacagattaccatattacaaagaaggcttatggagattaaatgtccttctggttttcaataaaacattattttcaagaaactataaatagtcccctctaaaaattcaatctctttatcctaccatggatttaacagaataaacgctccttctgaactcctgactcatttagtctgtccagttcacctgcccttagtatatgttgccgtgtacgtaatacaccccactgcttgtaagcagtcagaacaacaggcacacagctgtgatgcagcacagtgctctacacacagcaggcactggccaaacattcgactaattaatgaaacccataaacacactgtgttagcaagctgaattcctcatctttagaaatgctgtaatattgggccaggcatgatggctcatgcccgtaatcccagccttttgggaggcccaggcaggcggatcacctgaggtcaggagtttaagaccagcctggccaacatggtgaagtcccgtctctactaaaatacaaaaatcagctgggcgtgatggtacacgcctcccatctaccctggaggctgaggcacgagaattgctccaccctgggaggtggaggcagtggtgagctgagatcatgccgctgcactccagcctgcgtgacagaaatgctgtaatattaaacagcatcaatgaacacttagctttctgctctttctcaaaagattcttttatatatatattttttgagacagagtctcgctctgtcgcccaggttggagtgcagtggcgcgatctcgacccactgcaacctccacctcccgggttcaaccaattctctgcctcagcctcctgagtagttggggttacaagcacccaccaccacgcctggctaattttttgtattttcagtagatacggggtttcaccatcctggccaggctggtcttgaactcctgacctcatgattcacctgacccagcctcccaaagtgctgggattacaggcatgagccactgcgcctggccagattcttttcaatatttccaatattaattaatttgtagctatagaaattatcattctcctaagtgtgtataatttgaggaaggcagataacataaccaaagtagcttgaaacagcaatacgacaaattcttttctttttgacacagaatctcgctctgtctccccaggctggagggcagtggcgtgatctcggctaaccgcaacttctgcctcctgagttcaagtgattctcctgcttcagcctcctgagtagctgggactacaagtgcccgccaccatgcccrgctgatttttgtatttttagtagagacgggacttcaccatgttggccagggtggtcttggactgctgacctcaggtgatctgcccacctcggcttcccaaagtgctgggattacaggcatgagccaccacgccctgccaacaaattcttaatttacactttcatttgaaacaaaaaacacaaaacattactttcagtttcatatccagtaggattttaaacatttttctttcatcaaagcaaaaacacttgcttaagtggttaatttcacaaatgttaatcacatgcaaaagaatggttaaggaatataatgtccatgtggcattaaaaataaattggagaaataaattgaaaattgcataaaatgtgatggaatttccaccagaagtttaatcaagtttgtagtaacattttatcgtaataacactgttagacgaattcctagtgggctgagacaccaaattcaacttctgagcaatatcgaggaagagaatggtctctacaggcaacctcagaaatctgtcatcagtattaacctgcttaaaatgttttgtcattgacgaaatgaaggcatggaatacatacaccatcaattctgtggatgacaatcaattaggaaataccattaatcagataaatagccatcaagattttcaaaagatctcagtagttaaaagaacaactttaaaccaaggatgaaattcaacagatgtaaaatcttttccctgaaaagaataagacaggataaatatgaaaactctatcttagtttcaccttggggaaagggacttagggattttagttcagggcaaatgcccaaagtgaacagcctaacatagctacccaaaaagaggaggagggaaacacactcactcaagatctcctgtatacagcactttgcaaaaatggctggcayatattacataacgtaaccttcccagtaagaaaatgaggctgatatgaacaccatgttagaggacagggagtcgggacttaggaaggccttgcccaaggtcacactgctgttgagacgtggccagtgcacacgagtccctactctgtctcctgtgagcagtattaatagaaaggcagcgtctaaacccaggggataacagatcactccatttgttccacattggtgagtgtttacaagtgtttaacttatttacataccgtgtttaactcctgggacatatcaaaagctattttgaaagactcgaatttgatcaggaaagtaaccagaacagtgtgtgtgtctgctggggttgggggaagttcagaagacgaagaaagttcctggagatataactatcttgagctttctcattcagaggtaaataattcctgcaatacttttatgaccgtaactcacaggccaacatactgaatttaagagaaaaacacttgaacttcaataaatgaaacttccaagcaattaacacttttctataatggtatccgcttcaagggacgaatgttttagcgtttaagttaaatgacaaaatctctaaaaacctggcagaccttaagctattttcactcacaacctggaaaaatgtatttattcaacttggtttagtaaatgagtacattattaytgttgctcttgtgttattccggtgaacagctgtcttaaaatgtttccctccagcggtggctgctttcagggggaagggaaggaaaaggaagtcttcaaaaggggaacaatatcatggcgctgtgttaatcacttcagcatccgtcactccacactcaccacccttcttgaagccgaccatccccactctttggagagaagaaaggccattctcctctctgaagggcctcccaagtgcttccctggagacgcacttccccgggatgcccaggccgaagcaaagggggcggggagagaccccgggccgaacccttctgcccccaacccctccagcgccccgactcttcctggactccgacatcttctgcaccgccccgggcccccatccctcccgcaccctggtccctctggcaccgccacggactactcctgcgccccgacttctcttgcaccctgaacccttctgcaccacggcccttcctgcaccgccacgggtcctccagggacccgacccctcctgcaccaccacggaccctctgcattccaagcccacctgcaccccatccgccactatgccccgactgcccctgcacccccttgagccctgcagtgtcccgactcctcttcggggcatccggggaacgactcggcgcctgacaggtaggaagatggcggcactcacctgtcacagcagctgcgcccgccacccccggagccagcccaggtcgcgcaccgccagtgagtccctacgacgcggccccccgtactgacccgaagacgcgcaggacaccgctgtctccgcactgacgcgaccccacaaccccaacctggcgctaatgcacttccggtgtcgccggaagtcccgccccagtcccgcgccgctgggttctccggaagccgccccacacctccgccccacacccggcggcgccggaagtcacgccccggcttccgccccgcagccccgaggggtctgggcgcgctgaagaccccttcggctgctgggccaacgcccccacccttggtcacctactcctgccgccgagcggttcgcgggaggtggcctcgggggtcgtagctactcaccggcggggcgctccgagtccatctgccccgtagcccggcagccggggcgggagggctgcgagcccggggcgcggtccgcctgaggcctgagacccggggccgcctgcgctcagggccgcggtgccggccgcgcgggagcctggcggggacggcgcggtcagtgttcggctcctccgcagtgactcaccagcgtcctgaagcttttgatcaccattggctgggaaggaaaaacagaatcagctgttccctgcgaaaggtgggacttgggccgcttttttcttagaatctaggttggaaacgtcgcatgatggtctttacgtaaacagccgtctcaacgctctacagaaagcgctaaccgcgcatttgaagcccacctagagtaaatcaagagcgtgaaagcattttttttttctgtgtaggttaacattcctgctccttcctttaaaaaggaagctcaaggccaggcgcggtggctcacgcctgtaatcccaacactttgggaggccgaggccgacgtatcacgagattaggaggtcgagaccagcctggccaacatggtgaaaccctgtctttactaaaaatacaaaaactagccgggcgtggcggcgcgcgcctgtaacccctgctactcggaaggctgaggcaggagaatcgcttgaacccgggaggcggaggttgcagtgagccgagatcgcgcctctgcactccagcctgggacagagcgagcctccgtctccaaaaaaaaataaggaagctcaagatgaagagtcagaagtggtaacttgtttgttgcacaagaaacaaatttagcattctatttaggggatccagattaccaaaaaaaaaaaagaagtgaagttatttctgcattaagtatattaataaaactttatcactaaaaacaattctgtaagaggaacgccaaggaaaaaaatatttgagtttttagagaagtcattttttaaacttttagaggttgtgacatttaagtaacataattttatttagtacctagtatgcaaagacattgtactgggcatggcagcaaatagaaagctttgtaaatcgcagtgtcccatctaattaacccgcattctaacaggtggttttattttgctggaccgcaccacagtcaggtaacaccaagaatatcgctaatgtaattttttaagttgatatatttaggattccataaaagtcactgaaaataactgagagcatgacatgtcacaaaacaagggaaagaaatcattttgaggatcagtcgctttacatcttttgtaactaatttaatccccaaaggaatccaataaagtaaaagttattctaaattgaattttaagcatgagaatgtggaaattactcgtcaaaagtcaaaaataatcgtgcagcagggcaaagactaaaggctggcatcagaatccatattcttttcactgttgatgtgctagggctgcaggaacaaaatactgcaaactaggcagcttaaacaaatttattgtcagaggtctgactggaagtcccaaatcaaggtattggcagggttgattccttctgagagctgtgatgggagcctgttaatgcatctcagcgtctaggcattccttggcttgtggcagcatgcccccgccagtcttcacatgacgttttccatgtccgtgtctgtctgcacacttagcgttctttttatgaggacatcagtcatattggagtacagtagacgctactttaatatgacctcatgttaactaatcatatccacaacaaccctgtttccaaataaggtcacattataaaatactggaagtgaggtctttaacacatgaatttgaaagggggacacaatttaacccataacacactgtatcctgaaataactatccaatgtaatttttttaaaagacacaaaactagccgaaattataaaaggttatgattgcaatcctggtatccagttacattctccctcctgcagaagctgtggagaatcctgtctcagaaaaccaatttctattttgtcacatgtccatctatgcaaaatacatgtactttgtccctgacatagggcaacaatgctgaatttactaagactcatttttgcgcatggtttgatagggaattaagatttactaggtattctgtcattgtcctcattactgattattttaactgtgtctcaaacacttggatagtacactatagtgttataagctgtttgacatgtcgcttcctaaattctcaagttatatatatgtgtgtatatatgtcatgtaacaggcacaactgttttcatgtgtatcactttattgcacttcacaggtatcatatgtttcttacaaagtggaggtttgtggcagccctgcatggagcaagtctgtcagcaccatctttctaacagtatgtgctcacttcatgtctctctcacattttggtaattcttggaatgtttccgttattaaatcagttatagtgatctgtgattagtgatctttgatattactgtcataattgcttggggggcaccatgaaccacccctatataagacagcaaactgagtcgataaatgttttatgtgttctgaccactgcactgaccagctgcctccctatctctctccttctgctcagacctccctatccttgagacacagcaatactgaaattaggggccaggcatggtggtggctcatgcctgtagtcccagctacttgggagactgaagcaggaggattgcttgagcctaggagttcgaggctgcagtgagctgtgatcacgccactgcacttcagcatgggcagcaaagcaagaccctgactcaaaaaaaaaaaaaaatcaggcaattaatagccctaaaatggctactgtttcataaaagaatgagttgcacatctcttactttaaatcaaaactagaaatgattaatgattaagcatggtgaggaaggcatgttgaaacagctaagtcgtgaatgcaaaggaaaagttcttgaaggaaatttgaagtgctcctacagtgaatacacaaatggtaagaaaataaaacagctttattgctgatatggagaaactctgagtggtctgtatagattaaaccagccacaatattctgataaagcctaatccagagtaaggccctaactctcttcagttttctgaaggctgagagaggtaaggaagctacagaagaaaaatctgaagctatcagaggttggttcatgaggttgaaggaaagaagctgtctctataatacaaaagtgcaagataggccaggcatggtggcttatgcctgtaattccagcactttgggaggccaatgcaagtggatcccttgaggtgaggagttcaagaccagcctggccaacatggtgaaaccctgcctccactaaaaatacaaaaattaactgggtgtggtggcacacgcctgtagtcccagctactcaggaggctaaggcaggaggatcacttgaacccaggagttggaggttgctgtaagccaagatcacaccaccacactcctgggtaacagagtgagactccatctcaaaaaaaaaaatgtgcaagtgcaagataaagcagcaagtcatctaggagatctacctaagatcactgatgaagacggctttgctaaacaataggttttcattggagttgaaacaaccttattttgggaaaagatgccgcccaggactgtcataactagagaggagaagtcaaagcctggcttcagagctccaaaggacaggctgacccttgctagggggctagtgcagctgatgactttatgttgaagccagtgctcatttatcattctgaaaatcctagagtccttaagcgttatgctaattctagtctgcctctgctgtgtagatagaacaacaaagcctagatgacagcacatctacttacacagtgtggtttactaaatattgtcagcccactgttgttgagacctactgctcaggaaaaaaaaaagatttcgtttcaaaatattactgctgatttacagtgctcctgttcacccaagagctctgatggagatatacaaggagattcatgttgatttcatgcctgctaacacaacatcccttttgcagcccatagctcaagaagtcattttgactttcaagtctcattatttaagaaatacattttgtaaggctatggctgcccgaagatgtaactgaatcactgcactagcataataaaacatgaatggataagcagttgcttcttgtggatgaacaaagaaagtggtctcttgagatggaacctaatcctggtgaagatgtgaacactgttgaaatgataacaaaggattcagaatactccatagacttagtttatgaagtagcagcagggtttgagaggattgactctaactttggaagttttcctggccgggtgcggtggctcatgcctataatcccagcattttgagaggccaaggtgggcagatcacaaggtcaggagttcaagaccagcctggccaacatggtgaaacccaagctctactaataatacaaaaattagccgggcatggtggcacacgcccatagtgccagctactcatgaggctgaggtaggagaattgcttgaacccaggaggtggaggttacagtgagccaagatcgcaccactgcacttcagcctgggcgaaagaacgagactctgtctcaaaaaaaagttttcctgtggtttaaaaaaaatctttcatgaaaagaattgtcaatcaacgtgacaaatttcattattgtcttattttaagaaactgcaacagccaccccaactttcaagcaccaccttgatcaacagccatcaacattgaggcaaaaccctccaccagcaaaaagattatgactcattgaaggctcagctgatggttagcagtaaaaaatattaactttaatcatctcgaccattcagtactcatctaatattctctataa

SEQ ID NO: 6923 - DNA, 13358 bp, Homo sapiens
gaggacctcgtctaataggatctcctggagaaaagctgggccacaatgtattaaaccagttctagcgcagggatcacttgttttcatagcatctgtatccataaccactcatttgaaccacgggaccactgtgaaaattcaggcttaagagatggatttgtaaaactattctagttctccagggagctctatttaaatgtatttaaccagaattctctactgctgtagagaataaggcagctaagttaatacagtcttgattcttaaaatttaacatctttagtgcatttgcttgtgacatggaacacaatagtagccctccttcaccccatctccattagtctatgctcccaatcagttcctagatggagattttggcctgtggctacaaaaaccaattttcaacattcagtgggaaccttggtcaagttcaagtcccagacaaaggtttaacaagaatgcctctggctatgggatttgtaagtcctttgaaaggtcagtttttttcttgccacttcatgtagtgggtatacatgctaatgttggaaacctgctttctcattacaagaaaatactgatcataacaattaacctaacagagtactttctatttgtctggtgttattttaaatgctttacgtggattcattcattcaatttctccaataaccctgtgaagaagttagggctttaatcttcattttcagatgaaactggggaacaagaggttaagtaacatgcccaaactgcagcgggtgaatagtggagccaggactcaaagccaggctatcaggtcctaacctgtgtgcacaggccggacacaaatctgattaaggatgtcagttactaatatcagttctgctgtgagcatccaaaggcccacccaatccaacacagagagctgtctaccctcctccctccctgagcaattaagaaggcacctgataaggtctgcggcagcactggcctccctgccaagtacttggaatcagtccccaacatctggtgagcctgaagcccatgctatgtggggaatatggtatgccatcatttgcccaggagagtggacaatagtttctgacccaggctgtttccaggataaaatataatttcagggagaggttctcttcaaaaataatacctttatgtttgtatatttaaaaaaaaaaggtttacaagtatctatgcataattaattaatttcacattggcattgttattctcatcttagagttgaggaattcaagggctcacgggatgttaagtaatttacccaaactttactgtaaaactacagtaaagctaaccattaccatctccaaccaagtactaacattgaacagttttataattggttatctcatttgaacttcaaaacaatctattaatatatgaactattattttcttccacaattagcttcagaggggctaagttggcctgtgaccacacagctagaaagaatgaagctgagatgagcactgatataatgctattactatatttgtagggtatgtatactactttacaaaatgttttcatggttttaaagaatttaatacttatagtaactctggaaatagatggaaaagatatttttatactcattttatagctgtagaaacaggttcatttgggttaaatgatttgctttagcctggtaccaatatcccatatggccccatattcccatcaaacactgagagaagatgcttattagggagttctccttatcccagaggccccaaattaacggcaagtgacactgtatcaataagagtcaaacaggaaacagaaactactagagtatttagagcagaagcacttcgatgcaagggattggttgcacagataacagaggggctgagatgccagcaggggacagagaggcaacctagaggttagtaagcaccctaggagacacagagggagaattacctgttacctaagttcagatacctaggttactgggtagaagctagaatcatggtggcctgtgtagcggaagccaaagccacagagaagctcctagtagtatggatctgatggggtggagaaggaggagaaatactctggtttctccctttttatctcccagtagagactcccactgagcaaacgtagctgggcgccggctgacatctggcctgggaaacaggccgaatgggtcagcttccactccacaggaagacagcagagcagggaatgggtgaggaaggaatctgagggcacaggccacgaaccagcccagacccctctccgcctgtgtgggccatcatcattaatccaaaaagacaaagtgagccccattccatgacaaaagcaagaacacatggattcttaaagtgttagaatcacaggaaccttcatcagggctgttaggagaaaggctgtggttctgagtagggcaactacttgatggggaggccagtgatgctgcagaccttatcaggtgcctttttcattgcccagggaggcggatagacagctctctgtgttggcttgggtgggtcctttggatgctcacagcaggactgatattaataactggcatccttattgcatttgtgtccagcctatgcacaactatgtcagtttccctactcaaaatcacagcctcactcctaatactccctattcctcactccccttccctgcttgcttttcttcacagcactgatcactatctgatccatgatacattttatttgttcattagccaataaaacataagttccatgagggcagagaattttgctggttttaatcttttatcccattgcctagaagagtgcctggcacatagcactcaaaaaacagtttttgtcgaattaattttaaattgggtgatttcgctaagaatctggatgtatggttttccttaagaatttggcaacactgtttcatatatcactgcatagcaacaagtggctggaactgccgtttagagatggggacctgagttcactctctgatttgcctcagtccccactatgccttatagcctaaaacagccagcttcatccatttccattacctgcctggttgctgcaggtattcaaatgtgggacctctgatcagggctaaactgttcattctacatagagctggggaaacggagataagaacaggtgaaaggtctttggttgtcaaagagttcagattagagtctaattgagggctttcgtgatatgaagatcattgtactaggtatcagaacttggcccccaggcaatacagtcctttcacaaatgaggcatcgtattgggagctctgtatacagctgcactgtttaaactacctgtccaccaggagattataatctagcagcactctccttgttttcaggggtgcagtccagttagcccatgttagcactgatataaatttgggggaagacagcaattatgctcttctcactcattctgtattctaggtacccaactccagaggatctaactggccaaaagcaatggtacagctctgggcctttgtgcatgctcttctctgttgtgtgcactcctacacatccctgaggccccagctcaggacactccactgaaggccccatcatagccccctggcagaattgactgcctctgtgctccctgcgtagcgcatttatatctattctgcacagatcttgttcttttacacagtagtcccccttatctatagtagataccttccaagccccccagtggatacctgaaacggtggacaaaactgaaccctgtatctactacgttttttcctatacatacatacctatgatatagtttaactttatcaattaggcacagtaagagatgaacaacaataataaaataacagcaattataacaatatgccagcattgctaagcttgcactttggggccattactaagtaaaataagggttacttgaataccgccacggtcgatccgatcaccaagctagctactaagtgactaagggcgggtactagagataggaggctgaccttggacaaaggggcattccggtcccaggaatcaagatttcatcctgctacgcagaatggccggaaacttaaaacttaggacttctgtatttctggaattttccatttaatagttatggacaagagctgaccacaggtaactgaaatcgcggataaagggggctactatccgcagttctctagtacttgggagtttcttgcgacactcatttctgcaaccgagtgtctctcaacaaatcaaactgttcggaatgtttggaatattttaaacgaaagaatgcattcaacaggcagtgcccaactccccaagttgggattctctccttggatcagtctctcctgtttacccccctcctctcaccaccggctgcagggggacctctcactcctttccttcccagtccaaatgctgggcggtggagagccgcactcgcgacagacaccagaacgcaccttcgatagcacattcctgccccacctgcccctcagcacccgctgcagccccgacgagggtgggggtgggaggcagcaatccttcaggtcctcggcagccctgcgggcctaccttgtcccctttgcttaggacctgccaaggccacgtctctacgcttccgaacagcgagttcttgatcatgcccaacatgttgtagccgagacgctcccgacgcacgggaggacgtgaggtggcgggggcgacggagcaccacgggcagcgaccaccggcggcagggcggcagggcggcagggcggcagggcggcagggcggcagggcggcagggtggcagggcggcaaggcggcgggacggcgaggcggcgaggcgagaggcggggctagaggcaggggccagagggcgtggctagagggcggggcggcaattcagcccggcggtgaggcaagggggcgggacggcgaggtgaaggggcggagagagagggcggggcggcgaggcggcgaggcgatgagggcgggcagcagggcagcagtccagcagtgcagcagtgcagcagtgcagcagtgcagcagtgcggtgaggcgagggtgcgaggcggctaagcaagggatgggcccgccgtggcgagccgctgggccgtgttccgcctcctttcgggctttccgcgggtgtctggggagggaacccggccgcgggcctcaggccgtccccctccgcagaccccttctcttattctgagtctaacctatccgctggggccctggaaagcgattctcgcctggagtggctttaggcagcggtggtggggaacgtcctctctcaggtgcctgggctccaacctccgagccccgggttgctcacgcttctccggtcctctacccgaaggctcgatcccgctggtacagcggcggccaggctccctgtcttggtagccgtccctctacccccgccccatgacctcttctagaccattgaaagagcatccaaaccactttcctgctgccactctttcctaccatccctctaaatcacagtttccaggtgacttttctaagcatggcttttctcgttcactcctgttcaaaaatcttctcaccaattttgtcaccatttactcagctgagtgcctgctttctgtcaagtattttaccaataaatctctactccacaccaccgacaagaaatattttggagccatttaaaaaggaggaaacggaagcttctgccgctgcctgatcctccattgctccgagccgcgcgggtgcagcgggctgtggagccgcgggccgagccccgccggagcgcccgagagcccgcgcgtcccgggcgtccgtcggggtccgaggtccctccctcagggagtccccgctcggcagcgctctcgcgtttcacgcagcggccggggatctgggacaggcggggccccgaggccgagcctggcgctgcccagcggccggtgcaggcctcaagctgggccgggcggaggggaaccggcgagttgaagccccggggccgaaagccggagcctgtggcggccgcgggggtggggaggggggtggggcggcttcttgggcagcgccacacggcggcgcagtgatggatgttaacagcagcggccacccggacctctacgggcgcctctgctctttcctcctgccggaggtggggggcaggctgcccgacctgagccccgacggtggcgccgaaccggtcgcggtctccgggacgccgcatctgctgagcggggcccccgaggtgacggccagcccggcgcccacctgggacgcaaccccgggcaatgcctccggccgcggggagcaaatcaagaaagggccgagaaagttgtgatcggctctgtcctgacgctcatctctctgcgatcgcgggcaactgcctggtggtatctccgtgtgcttcgtcaagaagctccgccagccctccaactacctsatcgtgtccatggcgctggccaacctctcggtggccatggcggtcatgcccttcatcagtgtcaccgacctcatcgggggcaagtggatctttggacactttttctgtaacgtcttctccrtgaatgtcatgtgctgcacggcctggatcttgaccttgtacgtgatcagcatcgacaggtaccttgggatcatgaagcctctcacgtaccctatgaggcagaaggggaaatgcatgacgaagatgattctttctgtctgccttctttccgcctttgtcactttacctaccatttttggtcgggctcagaatgtaaacgatgataaggtgtgcttggtcagtcaagactttggctacacgatttactccaccgcaktggcatcctaatccccatgtgcgtcatgcttttcatgtactaacagatttacaaggccgccaggaaaagcgcggcctaacacaggttacctggcttccctcgagtggagccagacagcagtagtcaccctgaatggcacagtgaagttccaggaggtggaagagtgtgcaaamctttcgagactcctcaagcatgaaaggaaaaaatatctccatctttaagcggaaacagaaagcagcgactaccttggggatcatcgtctgggcctccaccatgtgctggccgccctttttcctcctgacagccagacccttctgtctatggcactgcctgcagctgcatcccactgtgggtggagaggatatttccatggctgggctatgcaaactctctcattaacccttttatttatgccttcttcaactgggacctgaggaccacctattgcagccggctccagtgccagtaccagaatatcaaccagacactctcagctgcaggcatgcatgaagccctgaagcttgctgagaggccagagagacctgagtttgtcctacaaaactctgactactgtagaaaaaaaagtcatgattcatgactgaaagagggataatggagatgaaataaacaaggcaaaatagaggtggaaacagaagaaagtcatttgccaagactgcagaatggaatgcagcttctgtcctttcttaggatggctaaaacgtgacaaacagcatgacctgatgtacaacatatcttatgagggagatggtgacctctccttttttctgtggatcagtgttattgtgtgttctcagtttaagatagcagatcatctcagcagtaagcacattgacagaattgagttccagaaaggaagcagtttcaggttcttagcacatgtccaaatccatgcaagtgggagaaagttccaatgcacactttccatgcttccgagtctaggtctcgtggtgaatattcagcaatcattcatgagaaagaatgtattttgttgtatgacagaagggtttaccaagcaaactgtggtaagcatagtatcgaatatgttgcatgtccattttagaaaacagagcccagtcatcagctaatacaaatgatttcccagagcagtgtttgtttcaagcttctgtcaaatagtttggcttttctgcagggtccctgtaacttccccacaaatgtacttctttgttaattcacttattgttatggtgtggctcaggaacaggtctcaggatggagagcagcatacaacctgaacaaagctttttcttgtgctctgaagggtcctgagacgtgagggggatgccttccatgaggatttttatctcagtgaagtgcgagtggtacccacctgtattgtcattaacatgattattggcatgtttttgactctcatttttcacaagggtgcagtggggccatggaccatcccatgggatggtccataactgtatgttatatggaaatagtgtgggaataatgggttttccatgaaaggttgtgatgcttctggagatgggggcataaacgtgttcattcttgttgagcagcattgtgttaaaccaaattgtgtgaagtggaggtcacctggaccactcctgggaaatgctccagaacaccagtctgttccttctagaaatttgttctctgtatttatttttattttttattttgaggcagtgtctcacccatcctgtctcccaggctggagtgcagtggtgcgatctcggctcactgcaacctctgcctcctgggtttaagcaattctcctgcctctgcctcccaagtagctgagattacaggcacctgccaccacacctggctaattttcgtatttttagtagagaaggagtttcaccatgttggccaggctggtctcaaactcctgatctcagttgatccacctgccttggactcccaaagtgctgagattacaggtgtgagccactgtgcccagcctgttctctgtatcttaaatcaactctgtgccaaagcagttctgtcccctgactcccacccctacccaccaaaaagtggtagacatgaagggcaggtaagggaacagaaaatgtctccttgcagatatatatattttaaacgaactgtgtaataagtatgagctaaggagacagaaagacagtagatgagaaaagaagagtacctatacctacaaggggcaaaatgaatgcaatccttcatttgataagagagaactgaaagagaatattatttttctacaataaagcaagctgtcctctcaggataaagtggaatttcgacatggattatggacttcttccaactcccattgacattgcttcttaccacacatggggaagggctgcctttcctgaaaggggaagaaggcactgtcctttcagacaaagtttgtacaaattcctgaactgcagatttgctaatgtgaccgcgtatacttatattcataatttaagtgattgtttatggtcagatacatattgttaaacttgaaaatgttttattacattacatcaaataaagtctatttgtagctgaaaaaactaaaaataataaaaaggaggaaactgaggcttaaaacaattaagtaactttcccaggcaacaactaatgtgtggcttggtgaggatttgaactcatgtctgtgttgtcagcgtccatatgctttgtactctgtcaccctggcttttccaacctgtatctacatctacatatggcactgctttccaaatactttctgaatgtccagcttcccccatggactcactccttgaaactgacttctctgaaagtgtccctcaaacactgtgtccatgaacactgtgtggtcctgtctgaactctcttgtcatctcatttgttctaatattctgcctacttgaggattctcttttcttttttttgatacaggatctcactctgttgcccaggctggagtgcagtggcatgagcttggctcactgcagcttcaaactccctggctcaagtgctcatcccaccttagcctcccaagtagctgggactgcaggtgcacacctaatttttctattttttgtagagacaaggtttctccatgttgcccaggctggtctcaaactcctgggctcaagcaattcgtccaacttggcctgtcgaagtgctgggattacaggtgtgagccactttgcccagcctatttttctttttttgagagaggatcttgctctgtcacccaggctggggagcagtggtgcgatcatggctcactgcagcctagaactcctgggctcaagtgatcctgccacctcagcctcctgactacctgggactacaggtgtgcaccactactgccagtgaatttttaatacatttttgcagagaagggaatctcactatgttacccatgctggtctcaaactcctgcctcagttgatcctcctccatccgcctcccaaagtggttaaattaagccaacctgcctggcctttatgaggattctttatgcatgttttacccattggttgcattgtcatttgaaattgttaacctaattgtcagactaatttgtggcagctgccctaaaccagagctgagggattgcctgctgtgctttcctcctgagcaaggggaagttgagccggagccaggtagtggcaatcaataatagtggtactgttgacctctagctttgtggtaaaagatattaactttattaactccagacaaaaaatatttgccctttgacaaatatttgttcattgctataaagtaaattgccatttaattatttcatagttccttgactctaagatgctattgattataagacaggccctgttattttatgtgccaccaagaaaaaaaacaaatgctactaagtaaactatgacattcaattgattttaaatgcatccagagacattaaaatgtgaaatagcatgcagcttggagttcataagagattcttaggttgctttgtaagggtctcttgagtatttttgctcacaaccatacctcctttataacaaactaatcttttaaaaggcaagatctatttttctttagcacttccctcactagccacacacagaggatgctcagtaagtgtggaatgatttaaaacattcttgatattagagctagtcatctattttagttactaaactatatacagtgcaatgggctctattactcagtatggtcaagtagcggaagtatttgggaatcagaaaacatcgggtcaaaagatggggattccaatctggctctgtcctaccagtgtaatgaatatttcttctgcaaatttcctaacctctgcagaactcactttctttctttttttaaatttagagacagggtcttgctatgttgcccatgttggtctcaaactccttggctcaagtgatcttcccacctcggcctcccacagtgctgggattacaggtgtgagccactgcacctggcctcagaactcactttctacatctgcaacactggggtaataatgccagctcacagtgctgtcgggaggattaaaggagtccaggcaataaaaagcactgtatacactgttaagggctagattctccccacaccagtggtcaagtttgtcctgctaccaagggctgaacattgctgcttcaagagcattgtggggaagcatcattttaaagtccagattatttggtgtcttgcctttttttttttttttttttttgagatggaatcttgctctgtctcccaggcacgatctcggcttactgcaaactcagcctcccaggttcaagtgattctcctgcctcagcctcccaagtagctgggattataggcgcatgcctcccaagtagctgggattacaggcgcacacccagctaatttttgtatttttagtagagacagggtttcaccatgttggccaggctggtctcgaactcctgacctcaggtgatctgcccgcctcagcctcccaaagtgctgggataataggcatgagtcaccatgcccagctatttggtgtctttctttatctgaagaatttggtatgctgtgagacattttcctttgcaatttattaggtattatgattgaatactgttgagtgtgtataaactgaaagaaaaattctaagccccccactcgactgaatggacccctcgtctcagccaatggaattccaaagaaacctgaaaaactagttcaggccatgatgggaagtgggggtcccatcatgcctcattataccttcctccttttggaattcaggcacaactgaccagtattaacattaaatcttaaggctgaaaacacagactctttgtagcaataagataccaaattgtaaccttgtatagcatcatatgacagatagcagctctgaaagaaataaaaatattttagatgccgggcgcagtggctcatgcctgtaatcacagcactttgggaggccaaggcagtcagattgcctgaggtcgggagttcaagaccagcctggccaacatggcgaaaccccgtctgtactgaaaatacaaaaattagtccagtgtggtggctcattcctgtaatcccagctactcaggaggctgaggcatgataattgcttgaactcaggaggcggaggttgcagtgagcccagattgcatcactgcacttcagcctgggcaacagagtaagactctgtctaaaaaaaaaaaacccaaaaaacaaaaaacaaaatcagatatgaataagaacatgggtggttagacatctctcccatcataggaggagagagggaggaaaaggtgggtgtctgcctatgtacttacggaggttggaggtggcaagttatgggagctcctgtcagaaggctttcattttctctgtgaaataggttatgagaatgatggaacaggaagcaggagagaacagctaccaccattctttccttataggtaagacatgggcaaatcaaataatatttggcaataaggcatcaacacacagttgcatgtaataaagtaggctggaatttattctcaaggtaatgaggatctattccattaagatttttacatatggtggctaaataattagtgtttctgcctcagtttagcagtagtattttctggtgcacctgagactcttctgagtcctggcccaagagtataaggctcacagagaaggggtatttcctccacattgccccctctctcctttgtgcagtctgcacaaagactgcctttccagtcagctttttttctttttttcttttttttttttttttttttgagagagaatgtggctctgtcgcccaggctggagtgcagtggcgtgatcttggctcactgcaacctccgcctcccaggttcaagcgattcccctgcctcagccccccgagtagctgggattacaggcgcgtgccaccatgcatggctaattttttgtattttagtagagatggggtttcatcacattggccaggatgatcttgatctcctggcctcatgatccacctgcctcggcctcccaaagtgctgggattacaggcgtgagccactgcgcccggcccccagtcagctttttaaatttttgcattcctatattttatttttaagtgacattcaa

SEQ ID NO: 6924 - DNA, 22121 bp, Homo sapiens
  misc_feature (1)...(22121): n = A,T,C or G, or insertion/deletion polymorphism (see Tables 1-2)
tgtgaaatgcttcatgttaccacttagaagcttgcaatgcagaattcctctcccccagcacactgtcactctgaaagatccactcaaaatcaggaaagggtatggagccagccaagtgaataaaggttttttactccaattaggagttgctcaaaagcctgtggccattcagtactggcaagactcaaagggcaagacacccaggtctgtaaactgggataccccgtacccacagagtctggatactaatactgctgaacagtgatagcagcaatcattacaggcaaaacatcattatcaaatttccagatcaagtttatgccaaggtctgaaaataggaacattcgtcatactgttgatcaacatcatctaatgagcacttcttgagagcggaactggaatcaggagggaagggaagaaaaaaaacagtggcctaaaagtcttatgggagacacagcacactaaaacacaaaattcatggaatcacttgtaatcaaaacatcaagaacagaaataaccaactaaaatatgcagagatggaatctgaatagtgaatgcaagatacatgggctgtgatcaaaatacaagtttattttttgtctttttccactttaaaaatattttttttcttgccgggcatggtggctcatgcctgtaaccttagcgctttgggaggccaaggcatggatcacttgaggtcaagagttcaagaccagcctggccaacatggtgaaaccctgtctctattaaaaatacaaaaaattagctgggcatggtggcaggcacctgtaatcccagcttctcaggaggcagaggctcgagaattgcttgaacctgagaggcagaggttgcagtgagccaagatggtaccactgcactccagcctagacgacagagccagactccatctcaaaaaaacaaacaaacattttttattggaggataataatctcctgctcctgaatagaaaattgggaagatcccctgactttttggtcactctttgataattggcaatcctttaagtaacagtcactttaaaccaaaaagtctcggccggccatggtggctcacgcctgtaatcccagcactttaggaggccaaggtgggcggatcatgaggtcaagagattgagaccatcctggccaacatggtgaaacctcttctctactaaaagtacaaaaattaggcagtcatggtggtgcctgcctgtaatcccagctactcgggaggcttaggcaggggaatcacttgaacctgggaagcgaagtttgcagtgagctgagatcgtgccactgcactctagcctggcaacagagccagactttgtctcaaaaaacaaaaaacaaaaacaaaaaaaccaaatagtctctatttagtaattagaatatttccagttcaaaactgtaatccaatactttagtcttcattctaaggtactaatctaagactgcttttcctcctcctccatgtaaggcatatggctggtggctgcctgcagctttctcctcaactttcttcctcccccactagataactgctattgaacctgcttgtgtaaaagtgggaggaggtaggaaagctaaggagatagggcaggtttttctttcttggtagggtaggtctgtactacctgggtcttgcacatggttaaagctgactctttttcttaaagcttgctttaaaaggttctttgcagattcccatcatcagagatctcttacttgagttcctttggccaaaaccaatgcaagtggttgactgtgacaaactgtggattgtagcatccctgtgttcatttctggcttctagccaccgggtccccctatacctctagacagcccatttggatagaccgaaggcaaccccacgttggctgtcttccatgtggcccacatctggtccaggaaaacatttatacattcgtcatccctcctgaatctgggtgtccagacagataccaatgtagccacctctactttgtggctacagccctctttaatttataagtaagcactggtgcagtttttgttttacaactatggggaacaatcttcaagttctctggtcccacagaagcccctctttaggcaacatcagtacttcctttccctctgggtaggaggagagtagggactcagcacatacaaatttctccccaagaagtctcttcacagacccttccttccttcactctcttgatctcaccatgaggtagaactgtttgtcaacactgactttggacataacaatgttgttgaaataatcatcattaattgcagttgaggatgttcatatctgtctcccaacccttgataataagagactgtctgtcttcatttctgtcttccctggagagttgagcacaaagcctggaataaagtaggtgctcagtaaatgtttgatgaaaggatgattgaatgtatccgaaaccaacttttgttgcgcactgaattctctgaggcacttcaaagtaatcagtatgggccaactttggtgtctcttgcctggctgacatgagctttggggcccagccaagtagactgtgagagtgttgccaaggcaattctgcatgcaagaggaagtgtggcaggactgggggtttgctgatagctgcctgggaagctggcccctcaggcagtgataccaccaaccacccttgaggtggtcagggcctgagcagaaggactgcagagactgcacatgccccttgaagcccaggcctatttcttggaagtctttagcattcacatttgctatctgaggaggtttactgcctggagtgaagtattcaaaatagaaaagacagagaagctagagaaggaacagcagtgaagcatcaacaagcctttactgggggaccattttccctcacaacacatttggagagcctgaaactgacaaagactacctgggtcagtggctgttgatttattctggtttcagtcattactgatatctgtccagaagaactagaaaaaaataattcaagttgtgggtgagatagtgttccaactctgccaaatttaacttttcatcaccattgacccagagagggacataaaaaaggccattgcaaattatgtgaaagaattttctcccaaactggttggcctgattggcacgaaagaagagatcaatcacgtggccagagcatacagagtatattacagctctagccccaaggatgaagatgaagaccatgttagtgaatcatacaataacaatgtctttgattgggccagatggtgagtttccagattattttggccagaccaggaagaatgcagaaattgttagccagttcaattgctgcacacatgagggcacacaggaaaaaagagctagccaaagcagtgatgctgggtgcaatattctcttgttaaagaggaaggaagcagccaggcgcggtggctcacgcctgtaatcccaacacttttggagaccgaagtgggtggaacacctgaggtcaggagttcgacaccagcctggccatcatggtgataccctgtctctactaaaaatacaaaaattagccaggtgtgatggtgcccgcctgtaaccccagctactcaggaggccaaggcaggagaattgcttgaacccgggaggtgggtggaggttgcagtgagctgagatcgtgccactgcactccagcctgggtgacagagtgagacttcatctcaaaaaaaaaaaaaaaggaagctttgtcttccatagaaatatatatattgtgtatatatatgtaatatatatagtatatctgtaatatatagtacatatgtaatatatatattgtgtgtatatatatatgttatatatatgcaacctacagaatgacctttgcaccattgtaccatgagaatgtttctattttggattggcatgttactcctgggttcagtcaaaatagactcttgaaactgtaagattacaactcaaagtctcccaggtagctgtggtgagaccagaggaccaagtctaaatgaagtcagtgaagagtggaggacgctcatggaaggacacagcaagggaggcacagccagtgcatctcccattatgaatgggccctcccagcagctttattggctctccagtgttttggacccttgctcatacaggctgtggaactgaatttcacagaaaagaataatttttatagcactttggcttctctcttcttgagttatttgctcttctgtgttcttggtggctgatgatagtcagattaggctctctgccattcaaagtttatctttgtacttgaaagcataagttttgtcttctttgttaatgaatatcactgtcaggcttgctccactgccctatcagcaggtactgatttgactaataaagatgagatctattgtttggggggaaaaaaagttagtttgatttctctaggggtctcttatgtgatttttagctaagtgatgggctaggttttcaatgacatgccaaatggaaataagaagatattgatcatgagtgtgacatagagtagttttctgcatatactgagttgcaggccaagtaaaataaaagtgtactcagtttttcaataaataagtaaaataacctgtattgagagcctattttatcactccctgggagactccgctcattcttacatttgtaagatgctgatggtttcccagaatttatatacttcagcatttcccaaccaagaaatttgagagatgtggtccagtgtggtgactcatgcctgtaatcccagcactttgggaggccgaggagggtggatcacctgaggtcaggagtttgagaccagcctggccaacatggtgaaaccccatctctaataaaaatacaaaaaaaaaaattagccaggtgtggtggcaggtgactgtagtctcagttactcaggaggctgaggcaggagaatcacttgaacccggaaggctgaggttgcagccagccgagatcgcgccattgcactccagcctgggtgagaagagcgaaactacatctcaaaaataaataatgatgatgataataataataataataataataataataataataaaaacattgccaacatttgcaacttggaaaaattcactttttaaaaaaaatctgtatttcagcttcttttgaaaaatggacgatctcaccatggtgcagtggcaggaagtggagggcatattcctacctggcaaaattcctttgagtctggagctcaaaggaggcccactcctcagaccaggtcatgaactttcagtttaccatcctcttactgatgtacatgatctgtctgggcctgctttaaatctctaattggttagatttggttgcttagaacaagctctggggagtaggtgtggggcactctggttaaacaggctaccgggcagaccacaactcttgcagtctgcctaaatgggctgctgcttcactccttccatgcaccaccaccatgtgctgctgacttcaaaatgtttatgctttgcacagaaagtctgtcactcagaggtgtcatcatgtttttgtgcgggaagtttcattaaccctaataagagttataaaggtcatttattcctctacatttagaatactacacctcttgggtggttgagtttgtctttgatatggtttacttgaaggagggtggacatgtacaggagggttctaaggagcatagattcgttccaccattatgaataatgctgtaagtatttttgtcaaagacacttcctactaagagtttagtctcctaagcaactgaaccattgtggatggacccctgctggcctggtccacgcaggtgcaaccatatagaatcggcccaacactcagggttcctgagcttttttatccccgctgcaggaccaagacccgaaccctgcggctgtggccgagaacgctgcactgagcctgcgcgcaaagcctctgagtaaaaggagaaagtaaccccctaactaggcctctggagggcgaaagctgctgcacaagtctgcgcaggcgcgccccgctgacgaacactcatcagtgcgcaggcgcccatcttagttggtcttctagtccggtaaacagagggcctgcccccgacagcttctgcttccgggtcacgccttgacagcggctttcaacccccacctcagcccagcaattcggtgagtgcggtccttggagtgggtctacagccaggtttcctaacccagggtaccacgcccaataacgcttcctctactccctggtcgaagtgctctagttctcgaggctgagacttatttccgggccttagaaggcagatcgaagagggggttggtccgcgtctgaggccccccagcgcaaattgcgtgattctctttcagtaccggacctaccgggattgctgcgatctgtttagagcccgtgcagaaagtgacaccgcacgtccttgcgtttcgtgcccttgccccccgccccctagcctcagcgagacagctgccgcgggccctcccgcagcaggtgcggtggggattacgggcgctgcaggctcggccaaggttctcccggggcgggagggggcggggccgaggcctccctcgcatcagagctgttgtgtcttctcttttccagtttgctttttttttttttttttttcagcttctcagtaaatgccctttggtgttttctctggatcccgtagcaaaagaaaacgagggagacagggctttcagctctagcagaggaaagggccttccaaggggatcaaaccttacacgggctgctgtctagtgagatcgaatttagctttccttgaccattcctgaagtgaatgctgtctgccctgaagtttcattcctttaccgggagcttccaggcagcagcagaccactgaccatactctcaggagttcttagcccagagcccaagagcgcccgggaaattagttcaggatttagtttcatccgattatcatggcccagaaatggttaacaaaacgactttatttatttattttaatttttgaatttttttgtagagacgattgggttttggggtcgtctcgccatgttgctcaggctggtcttgaacttccaggttcaagagttcctcctgccttggcctcccaaagtgctgggattacaggcaacagaaccactttggtccaagcctcctgctttagatgctctgtcttctgccgccattcttggaattaccaactcaaatgcacttgtctttttttttccttgaaacaaaaaaattataagatacagatacttgtctcagagcagtttagtggctactggagagattaaaacacatgccaaatctaaactatctagaaaatgtcatagagacatataaacaagtgtgtcagcttatccgtgcatgataacgggagaaaaatacctaatttgaattatcgatacatatgaatatttttacttgcattcttttaatggaatttacatctactataaatggctactgattcacaaaatagaaactatcagaatttatagtatataatatataaagggatacacaatcacaaaaagcaaaaataggccgggcatggtggctcatgtctgtaatcccagcactctgggaggccaaagcaggtggatgacctgaggtcaggagtttgagaccagtttggccaacatggtgaaaccctgtctctactaaacatacaaaaattagctgggcgtgatggtgcacacctgtannnnnnnnnnnnnnnnnnnnnnnnnnnnnnnnnnnnnnnnnnnnnnnnnnnnnnnnnnnnnnnnnnnnnnnnnnnnnnnnnnnnnnnnnnnnnnnnnnnnnnnnnnnnnnnnnnnnnnnnnnnnnnnnnnnnnnnnnnnnnnnnnnnnnnnnnnnnnnnnnnnnnnnnnnnnnnnnnnnnnnnnnnnnnnnnnnnnnnnnnnnnnnnnnnnnnnnnnnnnnnnnnnnnnnnnnnnnnnnnnnnnnnnnnnnnnnnnnnnnnnnnnnnnnnnnnnnnnnnnnnnnnnnnnnnnnnnnnnnnnnnnnnnnnnnnnnnnnnnnnnnnnnnnnnnnnnnnnnnnnnnnnnnnnnnnnnnnnnnnnnnnnnnnnnnnnnnnnnnnnnnnnnnnnnnnnnnnnnnnnnnnnnnnnnnnnnnnnnnnnnnnnnnnnnnnnnnnnnnnnnnnnnnnnnnnnnnnnnnnnnnnnnnnnnnnnatctcggcctcccaaagtgctgggattacaggcgtgagccatcgcgccccgccaaaacattatatattattaaatgaccaaaacaatttcatatgggtaatgtgcttatttatttcaagtcttgaatttcttaggatctaaagtaataaactttacattggttcaacagatgttaagaacctaccatgtgttcaggtactattgaaaaaatcagtatcgttattcccaaagagcttataataagaacacagatttctaagcagttgcacctagagagctgatactgtgtattatattttccctattgtttttgatatgtactgtttcatagaagtgttctaccttattggctgtaattttaaatggtccctaactcttgtctcttatacagccaagccttttaagttgaattgaagtatattgcattattttcttcttccatcctagaactctgtcctattgtggtttcaacatatatttcaccaaatctatttctcagttgccatgaatagccaattattaaaaattttcactcattttatttatttttttgagatggagtctcactctgttgccaagattggagtacagtagtgcagcctcagctcactgcaacctctgcctcctgggttcaagctattttcctgcctcagcctcccgagtagctggaattacaggcgtgcgccaccatgcccagctaattttttttgtatttttagtacagatgggctttcaccatgttggtaaggctggtctcgaactcctgacctcaggtgatccacccacctcagccttccaaagtgctgggattacaggtgtgagccaccacgccccacctttaactcattttaaaatctgcaaattttcctaaaactgaaagtacattttattattctgaattttaattttttcctagttttatataaatgactcyagggtagttatacttttgctttccttacctattttagaatactacctcaaatatttcctttttttttttttttttttttgagatagagtctcactctgttgcccaggctggagtgcggtggcccgatctcggctcactgcaagctctgcctcccaggttcacgccattctcctgccccagcctcccaagtagttgggactacaggcgcccaccaccacgtccagctaatttttttgtattttttgtagagacggggtttcactgtgttagccaagatggtctggatctcctgaccttgtgatccacccatctcggcctcccaaagtgctgggattacaggcatgagccaccacgccctgccaaatatttcctttttttcctcttctgaacacatttgaaaatgtttcagataacttttcattattaagatatatttgctccatagccttcttcctctcttttcacacataacaatcacttctatactgtttagtcagtcgaccaaccaatatttgttaaatacctaccttttgtgagattctgtggctggccttacatgggtgaaaaagtagaagacaaagtccttgccttccagttgattacagtttcgatggagaaacaatatgtacataactatattgcaaggcccagtgttataaataacttaatggtggtgctgatcataaaaaccacaaaaattcaaagaaggaaaataatgttttktgacctcttcagccttttaaaaatcctattccttgcctagtcgtttgtaaaccacacagagctccacgggggtcttagtacctcttggggaaatctcgtgctagactaggttagagtagaacatttgtgtccaggtttatccaactccctaggcaactattataatccaattccttatgattatggaaatagtattaatcactccttgaaatctgcttttagcattgggaaggcctcagagaagacctaaccctaaagacaggtgtgctcagtgatattgtatatgccgaaaacttctttgtttcaggcagtttggagcatgtgaacaccttgagccttgatgagttccagtatgtggtatattatgcagagcattcagagcaaatactctctctccgagcgcttaatccgaacaattgctgccatccgttccttcccacatgataatgtagaggacctcatcagaggggtgagtgtgctggtattgacagragagtccttgcgatatgaagtgggcaaaatcctcatggatcacagatttgcagctttgactcaacccaagatcacagggagtttttacattttgctaactgcattaacttgatcattaaaatgtatttcccctatgtttgcttcgcttcccttctccctttcactttgtgtatctgatatttttcttcatggaatatgttctcaataaccctagtctcatgttctttgtaaaatatctgagtacgatgcatatgtaatccattgagctcaaagtcttctatacatgttttattaagggaggaggtgagcaaagcagaggtggtttttatttttatttgttgagacagggcttcacttttgtcacccaggctggagtgcagtggcacaaacatggcttactgcagccttgacctcctgggctcaagcgatcctcccacctcagccccctcaagtagctgggactacaggcacatgccacccatgtccagctaatttttttttttttaattttttgtagagatggtgtttcaccatgtttcccaggctggtcttgaattctcatgctcaagcaacccacctgccttgggttcccaaagtcgtgggattagaggtgtaagccactgtgcctggctacagaggtggtttttaaatccttgtgagcctttcttcatacctgggttacaataattacatggagagattttttacttacattctatgttaaaagcagctaccacttctagctctgtagaggatatcaacctctaaaatgcatggtaattatagtttaagaaaacaccttaaccatcggatgtttaatcatggcccttcaataattgttatgtgactagtatcctagaaggtctttactatcctcttctatttatttttcttgttgaagagaagttacacagtttttgatcaccagaaaatgcatccagatggttacttgtgtatattctaagacttcaggctcgtcatttacagcctagatctctgtagctgcttcagagttattggacacaactgaagaaggaaaagtcatgcagtgttagcttattgtcagcaaaagtagtgtcaggagactccgcggtagaaaccttgtaacattctaattctagctctgctgctgagtcattcagtgactttggtctgactggtatctccatctcccttgattttttttttttttttgagacggagtttcgctcgtcgcccaggctggagtgcaatggcgcgatcttggctcactgcaacctccgcctcccaggttcaagcgattctcctgcctcagcctcccgagtagcggggattacagatgcccgccaccacacccagctagtttttgtattttcagtagagaccgggtttcaccatgtcggccaggatggtctcaaacttctgacctcaggtgatctgcccacctcagcctcccaaagtgctgggattacaggtgtgagccactgtactcggcctctcctttgattttgaatagaagcaccagcaaaggctagatggtaaagaatactgatactaagaggctactttgaagatgtttataaaaaaggaaaaacmgtgttaagatgatgccactattaatgatggtcatttgttgaatggacaaaagagcatgccatttctggcctcagtctgacagactcactttcctacttttccagagcatggtggccatagaaagtggattgctggtccagctttcctgcctgatgataaggtttccagtgctttgatacataagattgtcttcagtgatgtccaggtgaccatctggcagcctcccttgtggagaaacttagtaacttgatctaaggaattaacagttcctttccttcatcttcagtgtactcctttggtttggacattgacataatattaatagaaaaggaaacaggaactagcactgtatctataaaatagtgagagttagaactctctgtcccctggactcagttctgaattctgtcctgctgggcaagccagagctgaacacactgactgaagttgtcttactgcccacagggagcannnnnnnnnnnnnnnnnnnntcatggcacactgaaccccttgcactgtgcctgtatggtgtcagatgctgactgtgtggagttacttctggaaaaggagccgaggtaatgtttttaacacattcacattaatgactcactaaaacttgagcttcatgttttcttagaatttctccccatcactcctccatctcttccctcctccagtctgaacttctaactcaaggtaatgttggcatagccaatattaaggaaaatgtaatggtaaatatataaaatgatctaaggatttcattcttttacctttctgtccccaccctgcttgcccccattgtatggtgctgatactctgcctttctttcttctccttaacttaagctgtcactggccatcacttcaggaagcttaccttgtaggggctgtttatatttccgtttaatcttctcattgcttattgtctatccaggagatataaatgcagagatccctcaactctgattaaatctaaagtacccttaaaagtacttaaagtacttaagaagtggtacttaagataggttttagccaaataaaaggttgaatttacttaaatgtttcagggtttttttttgtttttgtctttcattaatgagggtatatgctatttggaaatttgaagaaaaaaactacaggtgatgctgactgtcagcaagccagctgcttttccagcactgggagatttgtgctcttcctatcacatgctttcatttgggttctcttgtgaacccacagcatatttttgcaaaggtctgacttatattctaacattttgaatttctctgtatggttaaagaacttagcaaaagctatgtttttcagtttggttgctacattagccacagggtacagaaagggtcagggtaagtaaaataatccaaaactctgtatagtcaagcagctttccagtaatgtttcagagcagttacggggacttagacttcctctattcctgccttaccccttactctgtggtagagattctaatgaatagataaaagaacattgcagcaaaaaccaaaataatgcagaccagctagtcagtgcacataatagtgttgactgtttgaggacagttcttttcctttttgctcctaagctcctgtcatatcttcatctttatcaccaggactccctgggagttgcttgctgaccctcctgttcagagcactgcatagcaaaggtagtgggtaaccatgcaagcttctttgctgctgtcctgtcttcctctcagtagtctgtctactgtaatagttcctccctttttacaggtgaatgccctggatgggtataaccgaacagccctccactatgcagcagagaaagatgaggcttgtgtggaggtcctattggagtatggtgcaaaccccaatgctttggatggcaacagagataccccacttcactgggcagcctttaagaacaatgctgagtgtgtgcgggctctcctagagagcggggcctctgtsaatgccctggattacaacaatgatacaccgctcagctgggctgccatgaagggaaatcttgagagtgtcagcatccttctggattatggcgcagaggtcagagtcatcaacctaataggccagacacccatctcccgcctggtggctctgctagtcaggggacttggaacagagaaagaggactcttgctttgagctcctccacagagctgttggacactttgaattgaggaaaaatggcaccatgccacgagaggtggccagagacccgcagctatgtgaaaaactgactgttctgtgctcagctccaggaactctaaaaacactcgctcgctatgccgtgcgccgtagcctgggactccagtatctccccgatgcagtgaagggccttccactgccagcttctttgaaggaatacctgttacttttagaatagccggagaagatgtttgcaccatcgtgcaggcagctctgggtgaggttgtccctgcagtactccttgtcacagaaaacagaaaaacagttgttcctgttgtgtggtttatagatttcgaagcaacatgtcacaacaataacctccatagcacctccccttcccaaaccaaacaacccaacaaaaaaaatccctcacttttgttttctgtttattgcttacctggctttttatattgcattttgcaaaagaagaggtctccctcaatcctcccctttagggaaggagtcaacagtgtaactaaatttctctaggaagatggaaagtacttaaataatgtgtgtgtggttttcctttggggacgtggttaacggtccagaagaatcccttctagaaagcattttaggccagccatggtggctcacgtctgtaatcccaggactttgggaggctgaggcaggtggatcacctgaggtcaggagttcgagcccagcctgaccaatatgatgaaaccccgtctctactaaaaatacaaaaattagctgggcatggtggcatgcgcctgtaatcccagctactcaggaggctgagacagaagaatcgcttgaacctgtgaggcagaggttgcagtgagccaagatcgcgccattgcactccagcctggacaacaagagcaaaactgtctcaaaaaaaaaaaaaaaaaaaaaaaccattttaattgatctgtgaaaaaacttaagaaaatcacaatttcagctaacagcaattgtgtcccaaagatgaagatactataacctcaaatggtgcagatccagaactgggctggatgacatccctactgtgccatgtcctggggcatttggaagggactggacctctttcccctcatcaaaggaaacagcagtctttgcctctttctgttggttgtgcccaagggctacagtagctctgaaataacaagagctctgtaataacagtaataaatagctctgaaataacagtcctaagaactcctaaagtcctgagaacttttcttgtaatgcagctttttctcttcctgagaaacagtgtgttctaatgggattcccaggcagttcctacacctacggtgtgtgttccagcagggaggagttatgggctgggctgccttttcccatgggtcttcattcccaatggaaagttcactctgcttagtttggaattatttttctttcagttgttctggaacctttgctttttattgatttatacaatacaattggtgggagggtggacttgggatgggagtgggaaaagcatgtaagagctccttttgtgatggtccatctacccaaaagagatctgctttagtgaacgatactctttcatttttctaaattagatcaagttgttaytgattttagatgacttgtatgcaaatttgaaaaacttttttttttaaagctgattgggaactacaaacaatgaatggaatctactgacacagctaattggaaaacagatgtcttcttctgtcctattgatgctggtgtttaaaaaacatcacttaaaaaaaaagaataaatagttctaaaagcaagtttggcaatttctacttttcctacttttctccaaccccccttagaaaaagttcttcgtttactgcctggctgttctatgtaactttccatcccaacctttctcccattagcagcagtgattctgggcattgctggagtgaacaggagggcttgggcagagtatctgaagagcttccccttcctttataccttctcccaccccaaatttggaattactgcttttatgttctcaactccagctgcacataaaatcactaaggaagctttttaaaaacactggtgccaagatttcacctcataccaattctttggaattttctggggtaggactgggggcttcagtgcttcaaatatagccaggaatgagattccactgtgttagtcagtggttctcaatcctagttattaattagaaccacctaggaaaatttttaaaaatactaaagcccaggctccacccccagagattgatttaattggtccaaagcagacctagtagggctggccacagtggctcacgcctgtaatcctcacactttaggaggccgaggtgggaggatcatttgagaccaggagttgaagtccccatctctacaaaaaaataaatgaataaagtagacctgggcatgagtacgttcaaaggtcccaggtgattctaatattctggtagatttataaactgcttgagatgctacttcatttctcatcatagatacttaatattctagaaagagaaagttttgtccatgtgggaaaaaatgttacctgtttctcagttacttcataatcacttatgtggttggtggctaataaattctgcttcacctccacttaagagttcaaacacaatttcacttatctttttagctctggggaaatagcatgcaccttcataggttttttttgtttgtttttaagtggtcttcactatgcctttttttcccagatcgtatcatcatcctaaattttttactctttacagagtgacattttccctctgattaactttccctgagccatccttccctcttcattttcttgaggaaacagctctaagattaaagacaggaaagagacagagaacctataaatcaatggcaattagcatttaaaatgttctgaatgaatgcctgaaccttccctttcactttgttttcataggccttatggctctggggatttgatatggcatgataaggaagcaggaatggggaatgaggatgaggtttgaagtcagaactgagtttgagttctacttgaataatattgaaggagacattatgtaatcaatcaccttgagctccagtgtcctcctttctgaagtcaggctgtcaccattgccctccaaaagctactatgaggattcaatgatgaaatgcctaccacagtgcttgatatttattgttaatttctcttcccactaaagaactgtgcaaagagtatttggctgccttattccctgactccagcaacaaaccttctcagtcactatttagaactgtttttagagtttggcagtgacaatttttcagacagccagcaagtagtgtactagagataatcccttcctccaccccctgtgatacccttaacgtctttactgcttcatcagacaagtgtctgatacatggggctgacagtattacattccacttaggaagatgataacaggagaagcaaaagcacagtgaccagttggcatttattagtgtagttacaatttgtcactgtagtaaaagtagtagaggaaccaagactctttgttatcacaaagaaataaataaagcttatttttaggaaaattctaactgagtaagtgatatctagcagtagcactagaggtgcccagccttgtgtgacagataaagctggggcagaagtcatgttaaattctacctaaaaggagctcccacccactgcctgctcctccagctcctggccagaactggtcatggctgcaaggtacagaataaaaggaaacctaatgaaaaaaacagctaaaacactgagaagatgtggacttattagggtgtgagctgaccatgatcaggtaatctattcccctcactccagagaggtttagacggccgcttccccggaccgcttccgggtgatgtgctccaggtgggcatggtctgaagtgtccaagtcaatctcgtacttggctaggattttgaggatgggcctcagtttcagccaccactgttccttggggattcgatgcctacagaggaatgaggtagatgatgatataatcttttagcaccccaatcaacttctaccaaaggtttataggaagaagttagacagaagaggttagatttaggacatgtgcatcacatctgaaatgggtaagaatacaggtgttactccttaaaaaaaaaaaagaattaaagacagtgaacaggttgaggacagtagagcttgaaactaccagggaaaagaaccactccaggaagcagatgtactcactcaaaatctgtctggtccttcagctcagccactggttggaagaccagagccctcttacgcatccccagaacacagcccgaatctggagtattggcaaagatccgccctgcaatgagggatgggcagtcagcttctatactggggaaccagcctctatagagggcactcgctctcaccccacctaccattacggtaactctctttgattttcccagacatccagttcatagccttggcgcccatcttagtggcaaaattcctatcaaatggggttgggctcccaccctggagaaagaaacataaaaattacagagggaaggactctaatgaagtggcagagatatctagacacacagagaaaaaaagaaagatgggccccaggcttacagcccaaaacaggaatccagaagtcaaactatgaaagggtgccctgaggcagtgccaggatccaaggcaagctggcccagcaaatttggccatgtatcagatataataacaactaattaaagatgattggccccacaatcccctcttttagctccacagctgccagatcctgttttagttttattggccaatgggtcagctgcctgcccctcttcagcccagcagcttttgttgatcactgtcaatgatgacataaaagtgttttttttgtggcccaatctggctgcccttggtagcacctcagaattaatataaaacatcatacagatttcctttgaattaagaggaagcaggtgggaaagtgggaatgtttggagacatttttgttacaattgggagtgagagggaggtgctactggcatctagtgggtagagaccagggatgctgtgcaactgtcctacagtgcatagaacagccacccatgacaaattatcatccagccccaaaaggcaaagctgccaaggttgaaaagccctcccatgagggcttttgaaaaggatagaccatataatctctaaagtcatttccaggataaagatgttttgattctatgactgtaagagactgcaggcccatgctctatgatggcactgacaggctcctccagaagactggaaaaggccagtggaagcctcagtggctgttggcaggtatggctgttggcaggtatggctgtctgatgaagggcatgactacggtgtcttccctacctgctgcatgtgaccaagcacattcttcctgctgtcgaagatgcccttcccctcctcagagtacaggttgaaaatgaagtcagtggtatagttctcattgcacttttcattcctgccaggtggagaccaaaagcctgtgactctgtggttggcttcccatcccccatttctgcctttgttctttcctttcaatttttatctcctccaaggattcaagggataggctggccccctccctttatatctacagattcctcagggtgtcccaacaatggccattctatgggtttgagccaaagcttatttttcttcttcacttaggaacaaaccatggatgaggtaccttaacaccaagccccttttcacagttgttttcatcttttgcaccagatgttcaacatttgcctgaaaatgaaagagtaaatcctaagcctaactgggaatggataaggttgggtataaatcatcttccacaccacacctctccaggaaggaagagacacatggaagagagttgtttacaatcctgggcctgaactgtgcctaattcctgtaagaagctcagtgtggactgaaatttaaacaatgactccaaatgagacagaactggaagagggagcactacagacagctgcagtaactgtcagtgttcagcccctcaccctctccaatctccctttccaagcctttctggttccccttgcctcagagggctgacttgtggtcacagtgtcagtgttgacactttatatctctgttttgagagagtatctctctcaaaagcagaatgacagcaagggaaatctgaaggggagacatgatgtagtaaaaagatcactgactttctcaaccacttaaaccatctgctcacttaggagtttagaaaagttttttaacctctctaaactttctatgttatatggagatagtatcttctttgcatgtctattgtgaagataaaatgcaaaaatgcccataaagggcttagcaccaggtcgcctgactcaaaatcagcattccaacaacagtagctgcggtcatgcatatgaggtgacaccagagaatgcctgcatagtgctctttctggtcttcacaggattctacagaccaatcagctcggtcctcaacttgagctctcatagttcagatcactgtggaaacagtctggagacaggggagagctatctagcaggctctgggtggccagctacctgcaggtctcgaatggtgaagggctcctcaaaaatgtaggcagcatcggccccagctgccagtccagccatggtagccaggtagccacagtagccacccatagtctcaatgataaacacccgacgcttggtgccagctgctgactgcttgatgcggtcacaggtctgcaaggacaatgggttatagttagaaagacatgatcaggggcctgattcttatcactctttaatctttgccattaattaaaccctggaactatattctccataggctagcagggcccttagagctcatcaagttcttgcatttagggtaacaggcatatttgccaacctcactgcagaacgtctctcctgggaagaaagctgtacctatcctttctactgctcagaaaattagactgcatgatctcagaaagaaaaaaaaaaacaaacaaaacatttggtattcagggtactggtgcatttctaggtgaggaaactgaacactttgtcacccaggctggagtaaagtggcacgatctctgctcactgcaacctccgcctcccaggttcaagcaattttcctgcctcagcctcccaagtagctgggattacaggcgcctaccaccacacccagctagtttttgtatttttagtagagatggggtttcaccatgttggccaggctgctcttgaactcctgaccccaagtgatctgcctgccttggcctcccaaagtgctgggattagaagtgtgagccaccatgcccagctgaagaatcattttcaaacattcccatttgcttgatataaagagtagctcactgtttgggaccacactcagtttaaggattataatcctggccaaaagggatgggaagtggtgataggctctcactgtgcagatagtattgagtgctgtgtcagccccaacgctgaagtctgagccagggacattgttggagactgtagcaggaatgaccacaaatgggatgcagagctcatcaaactgcttcctgccctccatcagttccaggccccctgtgtaagcctaagaagaagagagcacaagggcaggattggggagagggagaggaggtaggagggagagaggaagaaatggtggcaggcactcacctcaaagcccccaatgatgacaaggccctgaatgttaaacttagttatattggcactgatctgttcaaagctcttcttgggtagagtcctagttgatcagtgatggcggggaggggaaggggaattggaatttggggaagagacaggaaaattgagggggagaaaagctagagttagaggcactttatttttaatttcttgacctgtgccgccctccctagcccaccctctcagtcctatccaaggatacatactggagctctaagttgccagagctgctaaagatgttgagatgg

SEQ ID NO: 6925 - DNA, 81167 bp, Homo sapiens
  misc_feature (1)...(81167): n = A,T,C or G, or insertion/deletion polymorphism (see Tables 1-2)
agtatatgaaaccttgcatattttatagcattggagcactgatatcatgctataagtatcctctgcaacttgtaaaaagtccagtattacaattttttgctctttagccactaatatatggagctctagtttaatagttttcacagatttataaaagttcattatatgaatatattcactttaagtgttgatagatattcatatggtctacagtttcattataagcaaaaaatgatacactgaagattcttacataaatgtccttatgtacatttgagaatttctttaagaaacagccttagagtgaaaatgtcaggtcataggatagacacatcagctttcctagattttgccatgtgctctccaaggtgcttgctctgatttacactcttaccagtactacaaaaagtattctagttgttccacatcccagccagtagttactggtattatccaactttaagtttgtggttaatgagatggttgtgaaatggtatctcattatggctttaatttttatttccttgattacttgtgtaattgagcatctttggataggttcatgaagtttactggcctttcctcttctacatattgccatatatataatgtacatatatataatgtacatatatataatgtacatatatatgtacatatatgtacacatatatatataatatatatatttttagacatattctcgccctgtggcccaggttggagtgcagtggtgccatcttggctcactgcaacctgtacctcctgggttcaagcaattctcctgcctcaacctcccaagtagctgtgattacaggcatgcaccaccacaactggctaatttttatatttttagtaagacagggtttcaccatgttggtcaggctggtctcaaactcctggcctcaagtgatccacccaccttggcctcctaaagtgctggtattaaggcatgagccaccgtgcctggccatattttttaaacttatatatataaaaactaggatacttatcttttcatttataatttgtgatagtaccttttatatattcttcttattaatttttaattgttacacgctttcccaaaatcttccagcctatggtcatcttttaactttgttgatggagtcttttgtatagtgttagattttaatgtctgtaaatttaataattttttcctatatgaactgtgattttattttatttttttttagtttagagacagggccttgctctgtccctcaagctggagtgcagtgtcacaattgtagctcagtgtaacctataactcctgggatcaagtgatccccttgcctcaagcttcctgagaagttaggactactggcatgcactaccatacctggctaatttttaaatattttgtagagacaaggtctctctatgtttcccaggatcgtcttaactcttggcctcaagtaagcctcccacctcggcttcccaaagtgcttggattacaggtgtgagccaccatacctggccttaactgtaatttttgttttgtttctttccctcttaatgtcagatagttttctatatttttttcaaatttttttttttttttgagacagtctcacttcttcactcaggctggagtgcaatggtgcgatcttggctcactgcaatctctgcctcctgggttcaagcaattctcctggctcggtctccccagtagctcggattacatgcacgtgccaccacacctggctaatttttgtatttttagtggagacggggtttcaccatgttggccaggctggtctcgaactcctgagctcaagtgatcatcccacctgggcctcccaaagtgctgggattacagtcatgagccactgcacctggcctgttttcattttttatacaaaaatgttcaatccatgtggaatttatttttgaatatggtgtgaggtaggcataatcatttgatgctttttccacaaacagtggtctcagattcatttatcaaattgccctttttttttccactgatacataatgcaacatctctcatatatcatttccatatatgtgaagatgtgtttctgggttttctatactctcattggtcactttgtatagctgtgtcaataacatgccaattaatttctatagcttcaaaaaagtataatgcttcctatactgtataagttgtgtcctccataagaacaccagggtagagactgaaatccaaatcctgcttgatacacccagatataaggctgtgcctacctaaaaggcacttttttctaattcatagaaagactgcctgctgggtaaactatgtgctttcagggctccccgctttcatcctaggggtactttttccttcttcagaaattgatagagaaaggctactacatactctgaatggatgtcaattggacatccaaaaggacaagatggcaattctcccatcttgtccttcttcaaaagtgtctagtctatactaggccttttgatcttgctgaaatctatgtaaatcttgttgagaatttcactaatcttgcattgttttttattactttgtagagaattgacatatttttgaatttagttttcccattaattaatgtgatattaatatttattcatgcctttttaatgccttttaacagagttcaataatttattcataaaggttttgtaaatatttgttaatttattttcaaggtttccctttcattgtcatcatacacacacacacacacaattgcactttatgcttgtgcatcactcatgtttaggaacacattttttttataatgatgacattaaaaaatacttattggtcattcaaaatgaatttccttttcaaaaccttagtttattattttttttcctggtctatctgtggcgtaataccctcctcccagtgatttgtaagaacttttgaaagttgaaggcaaattgtatttcatcatatgtatttcaaattttttcttcctgtttgccgtttgacttctagtttcattattgggtattttttctttgactgcagaaaatttaaatttgatggagtcacatatactacccttatgtgatttcttttttgtttttatgtttcctttttcaagattatataactattaatttatattttatttttgaagttatttttatttaactttttaatctatttgatgtttgctgtaattagtaatgtcagttttattttttttcttttcaggaaattagccaaatgttctagcaccattttattctccactgaaccctgcttccatcataaattcatgccttaatcttcattttcagtcttgttaactacttgaagagttgataaatcttggaatttcagtcaatcaattaaacatttttgaaaactaagagaatactttaccttaacactgcagtagttcatgggagaatgctcccaacaaataattcatattttcacactgtctactcacagtctggccaatatagagtagataataaataggcaatagatggatgaatgaattgtggaaattaggagacatcttttaatttagatttatttttctttggaagggaggtaggttttaatttcttgcaaggttgtaattcagtagaacaggaagggagaaactaatgcagaggaacagaaggaatgcatgagatggagaatgcctagaaatgtttgagacattgattaagtcatcagaaatggaaacaagtttagaaacaacttagaaaataatacactgtaggtctgataaatattgtaagattgggagttttttgttaaattatggaaaattttatatagatacaatagtagaacagaccacatgaacccatctcatattatcttcaacaattatcaattcaaaagttgttatcgttatctctatctccacacatttcatcttttcctccaccactggatgactttgaaagaaatcctaaccatttcaactataaatattttagcatgtctctgtaaaagttaaagactctataacaacaagacatagacccaatatccaggttgagtaggagtttgctatcttactaatctaatgtattaacaaagtctagagcattcttattaaagtggtagagcatgaagaaccttctacctggagttaggagatttgctgggttgaagtcctggctctcaacttcccacctgtgtgactccagcaaagctcttcacttctcaattccaaatctcaatttcctcactagtgaaagaaggatacatagtagtagttgtatccatttcagaattgtcatcaggattgaagtaacagatgtgaaaacaaaactaaaattgtgaagtagtaacttccagtccaatcctcttctttgtaagtgatcttgaggacagacacatcacctgaaggatagatcatctttgcctagccttgtctacaatgttcttgctaggtttcttttcctaaaaacacattacttaggtacttaacagaacaaacaaacaaacaatcaaaagacaaaaccaaaaaactttggggttatagacacccatactcataagtatttctgaataccaagagaagagtatttaggtttgcttctctcaacttttcacctttcatttcatgtaccctgtcctttgtctcagctctaatagctctgagagctgattacttttcgggtgtcccaagtatcaggatcctgcctagtgcaactcaaatttccaaaagttaatttagtggccttttggtgaccagagcttcagataactcacagggaaacaatgtttatttcctctcccactaacagtcacaaaaaatcataaaaaagagtagcgggggcagttttgatggctaacccctctttccatcctttgggggaaaattgctcatctccctataggtggaactctaaagacaatgtattcctaaaaggggccatctgggcggtgtcctcttttcccagcgccctgatttctattcttagatctggagataggcggctttcatttttcctgctcccagttcccagaccttccgtggggccgcaggatccccggctggcgggtcgcggagggtggccggccgggctgcgcactgcgcgcctccgctgcggggctccgggcctgtggactcagcggagtccgctgagtcagtttcttcccgcgcgactcccggccgcgccgccgctgcggtggaatctggtcccaggaggcggcgtccgcccggggtccggtctaggcgtgcgtgggggccacggtcacggtcatcccagccaggcccggctccagcagccccacggccgccgccagagttctgcgcggcccgtcgcctcggcggagcctctggcaggcccctgagctcgtttttggggcctgagtgggggaggaggaagccgagcaggagggctccggagagggagggcaacgcggggcggggagctgcctccttcctcataaacaggcgggcgtgggcgccgatggggcccgcggggagcgctggctgcgggcggtgagctgagctcgcccccggggagctgtggccggcgcccctgccggttccctgagcagcggacgttcatgctgggagggcggcgggttggaagcaggtgccaccatggctagtggcagctgtcaggggtgcgaagaggacgaggaaactctgaagaagttgatagtcaggctgaacaatgtccaggaaggaaaacagatagaaacgctggtccaaatcctggaggatctgctggtgttcacgtactccgagcacggtaatcacttgaaaataaactgtgcttttatttttgcaaactttctccccctccttacatttgcaaattttgtcctcctccccttgaccctgctcaaacccggactcttaaggagccgcaaactcccatatcctttccttagggcagaaagcagctgagaatttcaggaaggtcttcacctttttgacttttctccccgtttcagactaaaaaggaaagggggtgctgtggattgtgactttgcttcttttccccacccacttgttttccagcctccaagttatttcaaggcaaaaatatccatgtgcctctgttgatcgtcttggactcctatatgagagtcgcgagtgtgcagcaggtaaaggcattgttttcacttcaactcattctcccttctgtttggaaggagacgttttactggcaatgttaatatagccgagagttcttggttattcccraaatttggcttgaggaacctctgactgtgattttaagatgggaatattgttaaatcattacgcaatgtaaacgggatgaagagccccagtatgtgttccctgagtgtctttaagaagtaactttataaaaccaacagtrtggatggtggtagaaggaggataaaaatgggttcggttttagtctcgttattggcaagatgaattcattagtgtttagacttgactattccaagtatcttcccaatacagagcatgtcctagatgagaagattatgaatagtttggaaaaggggaataattaatagtgataaaatgcaactttgtcactagcaaactcttgtagagttcagcactttttaaaattcaaagatttctagcctttagttgtagtataccttgtagtatctaaagaaagtgatgtcttatgagaccctcatagtttgcaactgttgtcatataaaatgcatgtagaagtgaaacttttacaatctgtaccataggaaacccagaaatttgctatgtatcttggatttttttttaaagggggccttaaaaatggtaattaagaatgatttacagtcaaaacaaaattataggccaaggtgataacttccttcggagcacttagagatttggggaactgaaatcagttttgtcatctgcatgttaactcatgcagagaaagagaattggactttgaactccttggaggtgcagtcagaaagccaatgtttcttaatggttgagaggcttgacagacatgaggcatctcaatctttaaagtggtgtgggtctatctttatcttgatgtttatctctgtatctagctgtatctagtctgggtgaaccatctagcttctttgatatgaggacwtttacatctggaagaaatattttaatttgttttcaactgtgaaatattttccatctgactattatagattttcacgctgctatcaaaccaaaccaagaaaagatggaggcataataaagatgctgttcttttaagactcaaagtcggaattttgcctgtggaatatgagtcactttttgggcactggcctattgtgcttcctgctctgcacccacgtcatcccttcttacttgtctctgctttggtgttcagaagtgcctgattctggccaccttcattccctagactctgtacttgatagagtcactcctgcttgatactgctcaggacagtcagatcctgggtaggcgttttggtctgcagggtctagataaggcagtgctatacttgasaacccargggagcctggaacatacttcctaattcttaattttagaaattgcccaagcctgagcatacttgtccggagtagttatgagtgtcacttagtatttctgcctagagagtaccagaggcaaagtatgctggaaaataaggaagagtttttttaaaagtaattaattacttttttggatatatcatagttgtatatattttggggatacatatgctatttgatacatgtatacaatgtgtaatgttcaaatcagggtaactggaatatccgtcacctcgaacatttttctttgtgttggcaacgttgcaatttctttcttctagctattttaaaatatgcaatgaattattaaccataatttccctgctatactattaaatattaacttaattgcttgtatctaattatatttttgtacacattaaccaccttctctttatccctccccatcctttcatttccagtctctggtaaccaccattctactctcttcctccatgagatccaccttttccgctcctacatatgagtgagattatgcaatattttatttctgtacctggcttatttaatttaacctaatgacctccagtcccacccatgctgttgcaaatgacaggatttcattttttatgactgaataatattccattgtgtatgtataccacattttcttttatttttagttaagtaattaatttagagacagggtctcactctgttgcccagactggagagcagtggtgtgatcaaagctcactgcaggcctgcaatcctgggctgaagtagtcctcctgcctcagcctcccaggtagctaggactataagcatgtgccaccatgctcagctaatttttttttctttttttactttttgtagagatggagtcttgctatgttgcccaggttagtttcaaactcctgacctcaagtaatcctcctgcctcggcctccatattttctttgttaatctgttgatagacatataaggtgattctgtattttaactattgtgaacagggctgcaataaacatgggagttcagatatatctttgatatactgatgttctttttttggatatatacccagygatgagattactggatcatatgaaaattctctttttagttttttaagatacctccatactgtgtttcatcatggctgtgctactttatattcccatcagcagtgtaccaccattcccctttttctgcatccttaccagcatttgttattttttgtctttttgataatagccattctgcctgtggtgagataatatctcattatggttttgatttgcctctccctaatgattagtgaagtttaggatttttttttcatgtacctgttagccatttgtctgtcttcttttgagaaatgtctatttggatcttttgtccattwaaaaataagacttttttttttttttttttttttgctaattgagtttttttagttccttatgtattctggttgttaatcttttgttgaatggatattttgcaaatattttctccctttctttatgttgtctcttcactttgttaattattttctttgttgtgcagaagctttttagcttgatataatcccatttgcctatttttgttgtaattgcctgtgcttttgaggtcctaccccaaaaatcattgcacagaccaatgtcctgtagcatttccccagtgttttcttctagtagttgcatattttcaggtctgagatgtaagtctttaatccattttgaaatgatttgtgtatatggtgaaagctgtggatctagtttccttcttttgcacagccaatatttgattctcactgaaatctcactgccctcctggaaatattaccggatgttttactgtcatagcgaagtgagagtaagctgctcactgaggatcaaagagcttgtgacagacctaagactcaagtcttctcacaccttcaaaatctctttccatcatacaatctactagctgctgaattcgcaagctttttgtgcaagctagtaaaaagcaaaatggtttgatacaaatactgtggccatgctaggtacaatgacatcaatttaaattatcattggtcttaacaaggggatgtagaaaggggtctcctactgacattttaatactcacttaaaagtagtatttttccttcagatttctttatattattagtataattactgtaagtatcctttactgctttatatgttgaattagctggaagtgccaaaagaaaaactcttaatgataaatttaaggtattaaggtaaatttctccttcatttaatttaatagtaattcttaattactatttaaaataaagattaaggtttgtttctagatgccatttaacatgatattccagactgccagttttattttcaaagtttgtttcatattttattaatgtttcttcataaatgacagtctttagaaaattgacggttaagctaggtgctttatatttttcttttcctgcctatcwtttcactgtgctcctaaattttacatctctttattctcaagggttcaacctttgaagaaggggagcaaaataaatgaaagtggctaaaattttttctttaacccctagactctttcctgttgtgcattaattacatgcttgagtttttagaataattataataaagtaaaactaccaatttaattgtattgtaactgtgcaagatgggaaccttctctcttagagagataagcttttaattgaatagattaatggatcaattgttacctctgctttgctgccagagattctatttaatcacagaagttccatgtagtgctggagagctcagttgcctgaatctttttgcaaagcgtttactgatactgttgcttcaccaaccaaaacaaacaggttttttccttgagtcagctttgtaggtayagagatgagtttggcatcctatgtracttttttttttttttttttttttttttttaccaccagaagctgttcaraatgttattttcttaaatagttcggaaaaaagtcttgatgtattctatgaaagcacaaaaatagtcagtttctatgacagctggattgtcaacgtctgttcagcttacgtggaggaggatgtcctacttgagtagtataggtagaaatagctatcaraaattgccgcctttgaaagcaatttgaaattatgtaaaaggaagtaatgacaaaataaagcaatttatgtttaatctggaaaagatccaaaagtaatattgtaaagagatcttgagtaatcatttttatcttcctaaaatagccgttgtttactcccgtaagcgagtaagaaacttgtgccattattccttattgggtgcatatagatttctcaccttgtcattcaactccttgcaatattcaactttacttatgcatccagccttatcccaaaatagcctcttccctgtagcagcttccttatcatgtagcagcctactctcctcaccgctcatccgttcttatacaatctggcttaagctctacctcttcatattatattcttctctgagtaatttcaactcacactgagtcttactttcagtatttctattatattggtatttattacacatcacacttagatacttttccattagtctctagagggtacatatatgcactttctcttttttttttttttttttgaccatgtcaagtatagttctatagtataatagaatgaattggagatcctttacatttagagagggaggagtctacagtaggaagaataggttaattttcatctccggtttgaaatcaggactttcaatttttttttcagaggtaaagagcaacttagtcaagttggcatcttgtaaacagactgagtgaagatatacttaaaatgcatctataatttcatattttatttcgaaatgtgaaagagcctactaggggtgtctgtgatctctagaccttatcaattcattctagagaaatctggagggagccattgaggagttctacctcctgtctattttatagagctctttctctttttctcctatcagatgtagattcaattgctaaaaatgccacgtttcttgcctctattattctagcttcattacttggggagcagccattctgataacttacattttgctactaaaatctccaacttcacctaatccttcattataagccacttcattttttcctataattaaaattttaaatatgtggaggaaattctgtcaggtagatatgacttaaaacctactaagggccaggtgcagaggctcacgcctgtaatcccagcactttgagaggccaagtcaggaggattgcttgagcccaggagcttgagaccagcctgggmaacagagcgagacccctgtcttcacaaaaaaaaaaaaaaaaaaaaaattagctgggtgtggtggcacatacctgtagtcccagctacttgggaggctgaagtgggtggatcacctaaggacaggagttctaggctgcagtgatctatgattgcaccattgcactccagcctgggtgacagagtgagaccctatctcaaaaacaaaaacaaaaccaaaaaaaaaaaaaaaacaagaaaaaaaaagtactaaggatctggtatagccattcttgcacttaataatcttggtacaacctctaaaactattttttatagtttattttattttgccttatttagacaattggcatgtctatgttcttcataatttagaaattatatgtatttatatatataaattatatatattatatattatgtataaattaaattatatatatatataatatatatatatttgaaatggattcttgctctgtcatccaggctagagtgcagtggcacaatcttggctcactgcaccctctgcctcctgggttcaagcgattctccttcctcagcctcccgagtagctgagattacaggcgcccatcaccatgcctggctaatttttgtatttttagtagagactgggtttcaccatcttggccacattggtctcaaactgccggctgaaatgttgtattttttgtatgtctttctggtatgatttttggagaaaggtgtatcctaagaatacggcttgcttttgtttctgggtaagcattttagggtatcattttgttgtataaccattgtttacaagtgagataagcatctattccactaagattgaagagattcatgtttgactgagtatgctctattaacattctttaaaacatgtgaatatatgtctttcttgttttcaggtgggttggtcacttctgtgcaaattaatagaagtctgtccaggtacaatgcaaagcttaatgggaccccaggatgttggaaatgattgggaagtccttggtgttcaccagtaagtatgatagatatgtaaaacaaatggccttgagtatttatytgtacacatgacaaccttcccttgatacactgtgtttgcaatccaaggctactcytgtggaattctttaaaatacagatatttttccttgagtcaatgatttacatttatagagagctttaaactcagaagtttgatttagaaagcawacatttaaggtaacatgtcagaagttattattttaataatataatcatataattataaaactggttaagttgtagatttttgatgagtacttttgaattcaaaccatgaagagattttggcttttaataatagaatcgatacaaaccactagttcttaaaaaaatgggaactgagaaaagttagttctgtaagtagtaatttgaaagttgatgttctactgtctttaaatagtacatttatatatatattcctatatatacagtaagtttaaactatggctttcagaaagagttaagaaagaggaaattamctttcagcacatctgtagccaaatcttgatagtaattttaccagctatgtttttgcagtttgcagcataatggcttcttagatgagactacttccttagccatcattaattaagaaaatattttctcaagaagaatgtgtttccaggaaaatacattttggatagctttgtttcttgacagttaaaaaatatcttctaagctactgaggaggctgaggaaggagaatcacttgaacctgggaggcggaggttgcagtgagcggaggttgcagtgagccgagattgcaccactgcactccagcctgggtgacagagcgacactctgtctcaaaaacaaacaaacaaacaaaccttttgtcattaactttaaatcttttttatacctaatatgacttttctttatcacagaaaaggaaattgtgaatattttttggcttccaatggtatatggtttatgaaaatttaatttatgaaaaattttcaggtgtttgtattgctgatcagtgtcaagtagtgctataaatttagacaaattagagctatgtgtttgtccataagtgaacatgtctgtgcttatacattttcccctctttgacaaatgtgttgctcttcttgttttcagtacataaagggtgtgttttggaaagagcatatttacaattaattggagttctcgtcttcaatctaatctctgtaattctatgtatcagttctaaagtatacagcatttgatgaggaattactcaaaatataccagtaattaggaattgtaactttaaatgtcccttggtttgggtgataatttccaggaagtccaaagatgagccagtctataacctcagggagtgtttgggaaactcatctagtcatattcctgtacaaaccaactgttcaaattaaattacataaaagtttatgtaggaaatttcattcactcactcacttactcattcactcactttgttcatccagtcattcatcttctattcattgaatgtttttgaagcctgtcctctgggtcagaaaccatgcagttgtgaagaagatagacacactgctgtctccagtggagtgtattagatcactcccagcaaaaattgattgtaaaacagatttctcttttttcaaggccttttccctccaaagacttaccagtactgaagaaaaatttcttccgtggtrataaagtcaggaattgtgggaatggtatagggagaggtaggggcagggtgattaggaggaaggctggcagagaatcgaagactggcttcattcaggtcctccaattgccaaatggagattatgcaacgtttcttgaatacatacaaaactctagatgtggccagctcagtcttcttccaataatgtaaagccaaacaatgctttgcaggaatagactagagattatattttgggattaataacatagggattaaaatcttatcttgaactaactaaacattattgatatgctaaattcacttttttttttttttttttttttttttttagacagagtctttctctgttgccaggctggcgtgcagtggcgtgatctcggctcactgtaacctctgtgtcccgggttcaagtgattctcctgcctcagcctctcgagtagctgggactgcaggagtacgccaccacgcccagctaatttttgtatttttagtagagacagggtttcatcatgttggccaggatggtcttgatctattgacctcatgatccccccgcctcggcgtcccaaagtgctgagattacaggcgtgagcaacggccaccggcccactactttttaatatatcattaatttctcttttaaaaacagtagcaatcaataatttaaatattcaaatgaattcttaatttatatacacaaactaacatctttatkatatctctatattttaatatatcaacatgtctaagataatttataaatttacatcatatataaaaatgggtttgctctcgatgtatataaggcttcatgatattttgaatatggagttgggtgaaaatagtgaatctgaatatttgaatttgaatatttattggaaaataagtagtgcttttaactttttaaatgagacacataatagtcccctgttgatttttttttatttttttaactttattaaagtatagttgacaattaaaaattgtttatatttaaggtatacaattgatgatttgacatgtgtacattgtgaattattcaccacaatcaagctaattaacattccctgttagtttttataagcctggttcaggtttgtagaaagaaacaaacacacatggccaggcacggtggctcacacctataatcccagactttgggaggccaaggcaggaggatcacttgaacccagaagtttagaccagcctaggcaaaatagcaaaccctgtctctccaaaaaagaatgaaaaaattagcctggtgtggtggcatgtacctgtatccctagcaactcaggaggctgaggcaggaggattgctcacttgagcccaggagtttgaggtttcagtgagctatgattgcaccattgcattccagcctgggtgacacagcaagaccctgtctctaaaagcaggcaacaaaaacacatgagcttcactacagggaattaaatacaatgagagtaataaaaaataggtgagcaaaaaaaatgcaaataagcaaacttttgagtatgatatttcattcttatcttgatttctgtttttaactccagattgattcttaaaatgctaacagttcataatgccagtgtaaacttgtcagtgattggactgaagaccttagatctcctcctaacttcaggtaatatgtgtatatgttttttgtgttgattcaaattwaaaaaaaagttgataccattaagtaaatgtgtgtgtgtgtgttttttttttttttttttttgaagatcaggattagggtagcttgatttaaatgtcctaaaattgcatctgtttttagacctagtgatgggacagccataatataatctaaatatcagttatttccaaaattctttctgtttccatctcttctccttatctcttttctctatactttgcctctcaaaaatctcwttcaatacattggttttaaacattaccttatatattatccccaaatctctgttggtagtccgatgtttgctcccaaaatctggacctacatctcatattcccccaggttagtggtcattcctgcccttgccattattacttctttctccctatatatctttaataaattttctataatatatgttctggagtatgccataatcgttacattttgaaaacacatagtattacttcttgagtatttgctagatgccaggcttcacaagtaaaatgcttcacgtgcttttaaacacctgaatctgaaaacaccccttgagatagggattttatctcagttttctaagtgacaaacactgaagtgcagagaagttgctttggccactaagaggtagaaacagggtctgattctccatgtcaggttccttccctgagaaaactttggcctggtagataatggacctgaaaacaaaaaatcttgaaatgatgcaacagttgtgggcattgctgtgctggacactggctattatataaggttccgagaagaaaggccgctcacagggagctaatcttgaagggctgggaggagtttccttccatgtaggggagggctttttaggttgagagaagtatgggtgcagaggcctgggaggatagcatgagagaggctggacgtgtgattgggaaggtttgaattgtcctcatcagtcctgctaagagatgtaaagaccatgctggagaaagaggaagatgagagtatgagggaaaaacaagaaggtactcaacatttcactacagctttttatgaccatgttgtatggcatgcactaagagtctttaaccatgatttaatttaacctcacccttgggaggtattttttttttgacggagattcattctccatttggcgatggacaggaagatgagggtttattaatatgaaaaatctaccaacactggaatatattgaagttagcctcatacagtactactactcctattccagtattattatttttattgacagaatagatgctgtttgtgttaagttttggattatgataggaaatgtttggtatagtaaaaggcaagagtgtgacatgcagttagtccaagtacgaagagataccaaaaaaaaaatgtttagtgaggagcagagtttagcatatttggagtgaagacaatgtgcggaaggaaaggagctgatgagatacatgtactatagtcggttgtgtgaaaggtcttgtttttcatactaaggatcatgagaagatcttagtagattccagcaagggatttgcaagaccacatttgtgttttagaaatataatgcaggcaataaaccagttggatagaaattggggactgtagagcaattaagcaactgtttttgcattctagatgagaatgcaaaacacaataggaatgaaggtgccttgttcaaaaggagttttgttcaaaaggaatcttcaagatgtgtaggagatattcttaaaggacttggtaatgaattgatttgttgcttggatagagaatgagaagagaaaggagggtggaagaaggaagatgactyaggagtttctcttgggtagctagtggattatggtatcattgatgaagacagggaacaggagtaggccaggtttggggtaactgtggaatattcagatgttgtctaagaggcataagaatgtatttcagatgtttggggcaagttgtctaggctagaagtactgattgagactcatgaaattatagtaaagtgaactgggagtttatctcatttataaagatctagagcttgataagtctaacatctagggcagttaagtagtttatcaacaaacaaacaaacaaacaaacaagaaaaccatgggtctacaaaccattcacagtcttcatgtaaaaattaattcatgtaaaaattaacacattaaatgtkaaagcagctctttactcagagcatattattctctttaaaataggtaaaatcaccttgctgataytggatgaagaaagtgatattttcatgttaatttttgatgccatgcactcatttccagccaatgatgaagtccagaaacttggatgcaaagctttacatgtgctgtttgagagaggtattttaaaatgtcaaattccttaaagtatatataagaaaaaaaggcttatactgggaaaagtagaacacagttataataagaagaaggtttctaaaatcctactatttattaagaagtgggagttgtctgtcaagggtgaggaatggggttaattcagaagtattgcttgttttggtggggtgaatttcattcgtgggttataaatcatgcccctggagtagactttcttcaattgcttaacaaggcataaggtttactttgaaaactggatgtgtgggtgctatgaaagaaaaaataaaactgtgaagccaagcataggttacactgggattatgatgttgagtcatcaccagaaatcatagaaattgcataaagagcctgaaggtttacaaagtgtccttcaggaaaaagactaatatgcatttcatagcctggccctgagattgataactgagattattatgtaattttagagttggttggagtccttgtttagtctttccattgaccttaggaggaagtgggtcacagcagtgaagtgagcatcctgcctgaggacacagagcttgtgacagtacagttcaattagcaattattttaagagccccttttgtatcattatgagagccaactgtgctaggggtttagataagaatgatttatgtgggccctgtgtcagttatcagtttaccagtctaatttcttgcagttcccagaatgggatagatcacctgataactgttgaattccctgtctcctcccagaaggattttaaacagcttatagataattataatacacaagagtaaacaaaatggatgagaaaataggtgaagggacaataatataaagctagattaagtttactgtgtttctaaggtcctgcatatttacaaaggggtgggccagaaatttgtctgtttgcttcctatctgacaaagaaaagaggtaaatatcagtggttacaaagttccttaagataaaagtaaacctattattcaggagaagcaattggtctcatgggagatctgagaaacatcttcccatggkttttcctggatgagacaataaaggacatacattttgcaaggaatacaaagtgtattgcagcgagagtgactctgtcaaaagtcagaatagcatgggcctggtacccagctctttgataatcatacaccgtgaagtagaagatagtttacagcgagtacggaattccttcaggctgtcatgtataaatgttctatcttgcaactaagctttcgatgacaattaggataaagtttgaggttctattgtcttgcagggtctgtaatcttctgtgtggaaggttaggggcacattcttcttcctggaaggagggctagcatcactttatcaccatcgttgtttagtccatctaagacactggaggtagaccatagaatgttacaaagaagaatgttgctcaatagaaaaaccatcagtgctgagagggttatgactataaatgtagagtagaaaaatttctgatttttccaggagtatcaggttctccaggactcaggggtgactataaagttaattttcaaaatttgaaagtgtactgtggaaactagaccataaagtgagaaagttccatgatattcttcacttgttaggaaaacttaactgatttcacattatattatagggacactctggcataaaattaaaaaaaatgaatgttgatcacttagagtgctgtgttttctaacatatttctggcgccattctcaagctagataaactataattttatacatgtttttcaggttgttgcccaataacaatgactccaaatggaacttactggcttgatcaaatgactttaattgtgaaaattaatgatttatatttttgctgtctgatggaaaaccactaagacagagtatttcaaagtctgattacttgccatttgctcaagttgacaactcttgaactgaaacatttagccgagctgcccttcagcagcctaccattaatgcctcccttttaaatattgcaatatgtccagttccagttggccatctttattagtcactgtcagttttctctagaatttcccaaatgaaattgtaaataattttgtttttctgagaactgcttgctgactagcacttttacatttcaaaacatggagtacctaacataggccgaaacaaaattatttgaatctccgtagcttgttttctcattataacattcttaggaagggctgcttcacagaaatayattttttatttaaggagattacacttgatgtatctcacacaactrtaatgaatattgtaatttttgaataattaaactttcatatcatctttaagcttattcagtattttgtctttcatttttaagtctcagaggagcaactgactgaatttgttgagaacaaagattatatgatattgttaagtgcgttaacaaattttaaagatgaagaggaaattgtgcttcatgtgctgcattgtttacattccctagcgattccttgtaagtagcatttaaatgttatttattttttgtatctgaaaaattacaatatatctcattctgagtatattttaacaatatttttattatttagaaacttgtggatgctcaacccattcattcatttattcatttaattaatttacattcactgacattatactgaagttggctgtgggcttggtgctggagaaacaatcgtggaaaatacagatgtgttccttaccttttcagagcttgtagtacaatgggggacacagataagtacagaggtgattacagtggcagaagtgatggcagatggcagaagtacctagagttaggagatcaaataggaagtgaggcagtgtctcttagcaaagatttaataagtggagcttcctgtgcatgaaggtgtgacctgaagtgagaatgcaggcaaagtggcccaggcagtgggcatggttaatgtaaagatgctggagcaagagagagcagactgccttcaagaagacaaaagtagctcagtaaaggtgtggggttatgagtgtgcgtgcatgcatgcgtgtgtgccgctgtgcatgcacatccccaaatatcctatccgtttgtgtttcattgacagaggcaagggagagcttgataagaggcagtaaatgaggccagagacatggagtggagagcatgaagggcctaaaaagccacatgaaggagtttgaattttattgtgactcttgattagcattttaatgaggctttgaaatttagccacatttttcaccaaaaatattaatcagaagaaattaatttgatgtgtatgctaccaatgattgctattaggctaaaataatggttcatattctgttttgttttgtattaatggttcatattctgttttgttttgtaagtgaccattaacactttgtattttatgtattacttgtgtgggtttctacaggatatacatatgcatttatctagtgatattttcatcctcacacatgtgaagttttgaggattagagttaaacaatgtacctggtatgtaataagtgttctaaaatcactgacaggattattagacaatatgtattttatatgtgtgttgtatactatatgtaattgcatttatggtttcagatatggaaatcactgtgtcaatctgaaggtgtgagccttcggtgtaggcagagtaaaacccaatgcccttgtgaaagaatgcttttttttggtgatgtttataaaatcacaatgttttcttatccacaggaaattaaacactggaaagtgggtggggctgaacaataatagagaaaggccatggttttacatttctctgagacatcactgccaacaaactgaatatgtttttcattatactttttccttggctatatttattcatttatttatttattttgggctggaggtttttggaatccattgttttccacccacatyggacataactccagtaaaaatgtgttgattcataatgcaaaagtcaagaaagtagcagctaaaaattaagaaatcaaaagtttttaaaacactgattctaactgaaaaacatttgcttttcagtctttaagtctattgttctgagtcaaagcagttcatttccttacgttgttaattttttttctatgtttaagcattgtaatatactttttgtgaaaacagttgattagttttggttgtgccaaaacaaatactaaaatgttttgcaaacagcctttttttaaacaaaaaaagaacagttaacatttgatgcagagatatacatgttttctccatgtaggttcacacctcacttcctttattgattaattgctttttctggtagagtctttctttcctttctgttttacctgtgtttgtccctaagacttatattttaatattatgcctcctctctttcgttctcccatcttttcttccacctattttggagccttcaggaagcttgattttgctgccttgtacattggttgcccttctggaatggaggaaacaggtcatagctgattttaactgttccatctggtgacatattcttgattttctttcttttggttggggaaaaaaaaacaatgcaaaagtcattctccaatggggttgagcctcgttaagaaatagaccctccacaatggttgaactagtttacagtcccaccaacagtgtaaaagtgttcctatttctccacatcaaaaaaaaaaaaaaaaaaaaaaaaaaaaaaggtaagcaatataacatgagccatatctaataggacttcagaaattatctatcctatagttccaggatgacgatgatgatggttgtgataatgatgaagattgtgatgatagttatatgggagataaaactttaagcactttacatattaaattctataatattcaccacatctattaaaatatgttacattattgtccctattttaccaacaagaaaactgaccaacaagattaaacaacgtgactaagttcacacaacctgtaacagcagaatctatgtcaatcacaacacaattagcagctatttctgtggcaattttcaataaagatgtgtctggaaaaaaaaaaaagaaatagaccctccaatttatttatctgaaaacttatgaccaatacattacatttccagactttcattttcagtacttttcctttcattttcagtactaaaagtactctgaatttttcctttttttgatcttaaggctttaagccaagaaacaggaataaagtaaattttccttaatgccaaagattagtcctacaccccattatgttattaatgaacagcatagtattttttacagctacttaaagaacatgatgtttaaatttggaaatgcagtcattatgctgccatctatttacagtctatataagacgtctttgtatgyatatttgaaaggagaacatggttaccttattgataattatgatctctttaaattcaggcaataatgtggaagtcctcatgagtggcaatgtcaggtgttataatattgtggtggaagctatgaaagcattccctatgagtgaaagaattcaagaagtgagttgctgtttgctccataggcttacattaggtgagtttcttagttaatatgtcatcacacactgtatgatatacatatacatataaaacatatatatgttgcataataatggataagtagcatattgacatactttgaatgaaaatattgtaaaatcccagaaaaaataaattaaaacaaaaagaaaatactgtaaattaccaaactgttctgctgtgcttagatggacttttaaaaggagtgtcaaaaatagatgtgtagaatgtaaaagaagtattatcttaatcttatttttatagatgtagttctatagatgagtttttttattgttgaggctatatttaaaatataattatgtaagaattgatacatacaaaaatatgcataacatatacaatataaagcataatgcaaataactcactatccaacttaaatgttgtatattcccagtgggggaagctaccctgggcttcttcctgcccttgctttctctatagaggttaacactatccagaattttgtgtttacaaatcttttgtttataaatatgatttactacattttcatgtttctctaagcaaaattgttaatgtttgcctgcttttgcttcatcaaaatgtaatcatactgtatgttgtcttctgcaattttcaaatatcagtgctatgattataagaatcagaaatatttttgcatgtggttgcatgtagtattctattatttggaaataccacaatttatttttccatttttctatccatggacatttggattctttcttattttatgctactactatctgtgttaaaacagataactgaaaaagaacagttaacatttggtgcagagatatacatattttctccatatataaataagggttaatattttaaaaaatatttatttgccattggtatgtccttctttgtgaaatatgcaatctgtcatttatcaatattgttcacaggatagtctgtctttttaaaaccgattcatagattctggataataatgttttggtggtaggttatacgtattgaaaataccttcccttgaacatcacactctggggactgttgtggggtggggggaggggggagggatagcattgggagatatacctaatgctagatgacgagttagtgggtgcagcgcaccaacatggcacatgtatacatatgtaactaacctgaacattgtacacatgtaccctaaaacttaaagtataataataattttaaaaaaaaggagatgaagaggtagctgcaggttgactgagcaagggtcattgtctatttgaagtttcaaaggtatctctgaaaataaacacagttttttgcaagagtgaaaaaaaaaaaaaaaagaaaataccttcccttgacttgtagcatgtcttttcaccgtctttatggtggcttttgtgatatagttaaatttaataatcagttcctttgtgatttactcttttttatgtatcttgtttaagaaatcttaatctgtcctttccctaagataataaatatattgtatattttattccaaatcttactcgtttgttaaactgttgcagtttgtttttgtaaagaacccaattccccctctttttttcagtgtggagagctagttaccatcacagcacaatttattagaggttcacctgtttcccagtcatgtggtatataaatatgtaaacatatatgcttatgtttctgtccttggcgttctgttgcattaatctgatttgtctgaatcagatttaaatctgatgttaaatataacactatttaaattaatagttctgtaagtcctgatatctgaaaagctaataggtcaagtcaccatacattcttttttaggcacagcttgccttttttcttgggcctttactattccatgcaaattacaggattaacttgtccagttccttggaaaacactgttgagattttgactggaattgcacaaaatatgtggatcattttaagaagaactgacatctttacattataatttcttctatacatgtcttgcacatcttagtttttgctacgtatcttattttttattattattgtaaatggtatttctttttaaatcatatttttgractgtgttttcataaagaaatgcaaatgattttttgtatattgaactaacctacctttctaaactcttcgttaattctgacaatttgtttctaaatgcacttaagttctctacctagcaattatataatttgtaaataatgacagtctgagttcttcctttctgcttcttatattctttatttcatttccttgtcttcttacatgagtcagaattattaatatagtgttaaatagagccattgatactagacatccttgtcttgctctttttcctgattttaaacagaatatttttaatattctcccatccaaaataatgcatcttacaagggtttaaayttttaaaaaaaattttgttaagaaattttattttatttcttctttgcttttgttttttcaatgtgggcttttaaatgtttgcttttatttttacaatgtgggcttaaaaatattaaaatatttaattttatcaaatatacttaaaatgtagtaagtcttttttttccttttcattatgttaatatgaagaaatacatctacaggttttctaatactaagctactktgcacttcctgataaatttaacttggtcatttaytagatttttaaaaacacttctaaaaaatcttctctgtttattttcacatataccaggtgagttttggcagcctcttgttttttcttttttaccctttcttttttgttaaaaacatccttttatttatttaatgattaatacatggctattttgtgttttgtatctgataactatatataaagttctggggagtctaaaccaactgcttctaggctgactgcctgtcagttgcggagccttgttttcttgtatggttgtgagtttctcttttattgagcatcctgaggacttaaattaaagatgctctttcagaggtgtttgccaggagtcagagcacaggactgacctgggagcagtttaggatatgatccaggcttaatatgggagactctggttgagaccttaccttgcagagagtctgaaactggtttgttgaatgcagcgccaggattcatgctttcccacragactactctggcgttcaactcacagctcttgtttcagcttctttttgaactccctctgcccctcaacacacaccttggaaatttccttgatatttttgtgaggacaacaatgcatttaaaagtgagagtggttgctgaataataaggaatgatcgttaactgttggacattgattctgatgacattttctcaaaaggataaccaggaatattttgtacaaaattaggattattataataggcatttagtttttcattgttacaaattttgaggaaaatcattaatcatttgaaaaaactaattgacatgtctccattgtagcaacttgtattttcacttctagtatcatgattatatcccctgtgtaatttggaaattgattttagcattaggaaatttcctagtttcagttaaaatgaattttttgtaagctgaattctattttacatgcacaactttagtttgttatttctttccttgacaagcatttattgaatgttgttatatgactaaaactgtaagatgataatgttttaatattttcacatttctttcatagcttccaaagtgtatatatatactcacatacttcatatatatgaatctacttatatactgtatataaaaatatgtatataaatatatacacattgtatataaatgtgtatatatatttacacatgtatataaatatacatacaaatgtatataaatatacatatttatacacagatgtatataaatatacatatttatacacagatgtatataaatatacatatttatacacagatgtatataaatatacatatttatacacagatgtatataaatatacatatttatacacagatgtatataaatatacaaatataaatatatacatttatatataaatatatatattttttgatacgtacaactatcttgggagatgggatattgttattatttccacatttacagatgaggtcctgtggttcatcaatctttgtgttttattcaagattatgtaagcagtaagggatgaaatcaggctgagaacccaaatttcttcatccctaaacaaagtatttcttctaaacatggtatccatttactagtttatctctatcaggtgaccctttattcattatttttcatgagaaggttgtagttgtacaaagtggctgatatctgataatgttttaatctaattcaaagtcgatttcttaaatccaggtgtcagagtagcacactactgtacaattctctgtttcatgttttacaatttaccacagtcaagttacaacttgcacatgttacattaaaatgtgaattcaccttaatttcttgaaatgagccagaagaagaagtggttttgttttgtgatcagggaaatgctacttgactgccaaattgtctagaacagcacattaaagttgcttgattttatactgttaaaattaaataaaacatggcaactgtcatgtcatatgtaacttttgtattattctgtaactttttttgaaaataaaaagtgatcaaattgatcttcaggtaaagaatcttttttctcttgattatctcttagtggatgatgatttgttccatttaatgggtagagaatttattgttgctgttattgtttcaaaagtagctgaatgaaactcttaactttttcttcatagttaaaattaaaacctcaagtaaataaatatttaacgttttgccaaactatgtaatctaattatgggcttaatgcatttaaaggctttgtataatttgctacgtattttcacacaagttacctgaacataagtccagtcttcctgctgttttctgagtcacacagtgattcagtgaccgaacagctgttggcagtggtgtgggtataatagggaaaagagactgatggggacaacccaagtttagacaagctggtaaaagtagaagaaaatcttcttgaaaacactagtgatcactaagggctgtggagaatttttgcttggtgggtgaatgtggaagaggcaacagcatgggaaggtgttggtaaaggagctccatacttgcttaaactgccttttgattgtgaggccgttgatgaatatttagtttgggctttaggttttttatgatacaggatattttccatttctggctttgtatctcagagatcacttagttacacttatagatgaataggagtttcaattccttgttttagaaagaagcttggtaactgttagtgagttacaaataagccaaatagaagaaggtacatatttctgcagtatcaggtaaagtttttcctcataaggatttagactcttggatatcatattaattctcagaagagtgggtataaaaaggtatgggacttcttcctggggtgggttggaggtggtgaaatacctttttttttttttttctgagatcatcatagacaagatcaaataatggtaaacatgccaatgaattttctaagcactattcctttaagtgaaagaagagtgtttcagtaaaatgatttaatattgggtcttccaaaagatggatttaagagtttcaactttaaaagacagaaaaattaagttattttacacaatgaatattgtcgtgccgtgtgtcacagacatgacatgagagggaatcagagaacatacagttaatacaacgcaaactagtatcattacttttgctcaatcacttccattgtctaagtaagataattaaaggacagcataaaataaaatttcaaaaytttactcaatcatattaagctattttaattaaagtaaatgttttaatgccattgaatattcatcaccattcaaaattattgatgtaaatagtgttatatgttaaaggtaatttaacttccatggatgagaattcagctaatgtttcacttaacttttaggtaattttttcaatatcctggtattaaaygaagtccatgagtttgtggtgaaagctgtgcagcagtacccagagaatgcagcattgcagatctcagcgctcagctgtttggccctcctcagtaagtaacttcactaaaaaggggattcttacagaggcatttgacatcaaatatgaacattgtaacaagagaatcatatgtacagatggaagcattcaatgccttttctgtcctgtgtagctcattttccagtagaggatactttcaaggaaactaacagttgtgacaaatatacacatctcaatgtagagttttgctttacatcattcttgatttagctttgtcattaagcagctaatctgttttaaaaaaatttttatttgtgcctgggcatggtggctcacgcctgtaatctcagcactttgggaggccgaggcgggtggatcacaaggtcaggagttcgagaccagcctggccaacatggtgaaaccccatctctactaaaaatataaaaattagtctggcatggtggcgggcacctataatcccagctgctcgggaggccgaggcaggagaatcgcttggaactggagggtaggagttgaagtgagctgagattgtgccactgcactccagcctgggcaacaagaaygaaactccatctcaaaaaaaataatytatttgtgttttaagttctggtgtacacgtgcaggatgtgcaggtttttcacataggtagacgtgtgccatggtggtttgctatacctattaacccatcacctaggtattaagcccagcatgcattagctatttttcctaatgctctcccttctccagtcccatcccctaacaggccccagtgtgtattgtccctctccctgtgttcatgtgttctcattgttcagctcccatttataagtgagaacacgcagtgtgtggttttctcttcatgtgttagttatctgaggataatggtttccagctccatccgtgtccctgcaaaggacatgagataattcctttttatggctgcatagtattccatggtatatatgtaccacattttctttatctagtctatcattgatgggcatttgggttgattccatgtctttgctcttgtgaatagtgctgtgatgaactaatcttttcaaataatcctcctctcgtctattaggttttttttttttttggtaccttcttcctcattttattatttatctggataggatggtagcattatgagacgtataatatattaaaaattatctttataattgaccaaggcttctcctaaagcacacctcattctgttggtaatatttcaaaatatggacttagagttggtcaaactgttaagtagataatatatataatgtttttatatatttttcaatttttttcaagctgagactattttcttaaatcaagatttagaggaaaagaatgagaatcaagagaatgatgatgagggggaagaagataaattgttttggctggaagcctgttacaaagcattaacgtggcatagaaagaacaagcacgtgcaggtaggactctcataaatattagagttattcaaaattatgttttccagtcatttatattttgacagatttcttttttctcccctaatccaggaggccgcatgctgggcactaaataatctccttatgtaccaaaacagtttacatgagaagattggagatgaagatggccagttagtagttttgattttatatgatagaaaatttcagttatattttaaatcaatacctataaaataccttaaccgtaacttttattgttagaaatatttttgatataggcatttagttttagatgttgctgcaaaatagtagtaggtatgtagtattttgatctcatcaccttcaggagttagaaaaggtagaatgagagttattattgagagatttggaatcaagggtcatttggtaattcatgaatcrtggagaaagaatctttctattttctggctgatcrttttaaaatgccatattaattcatcttgggtgatagaaattgcagagccatctgtgatcttttcttctatggtgactagccagcaggttgtcaatatcagaaattagatttggttagagagcttcctatgatgagttcccawctgatgtgacagagttgacctgtcttctttcgagagggttatttgaagctgtcatctctggataactctttcaataggagtgccattcaaacatcataagaccggcactctctcccaaagatacaagctgtagcaaggagttttgtgcatatcaggtttgtttcatatccgtgagcctttgtgttttatggcaactgattgattatacttgtgctatttgcaatgggtatcctctgggttttaaatagtgaatgacttattttggaaacaaatagtagtattctatgtctgaaatcttgaccgtctatttgtttaattatctattgctgataagaagggaattaataacacagatgctacttaattaaatattttcattttgacaagaaacagtaattcttttgaaaactatgctaaattggcatcttaataatctcatgttgagcaaggcttttggagattagggtaagggagattcatgtcgcagtttataaatttcagttcataggatacctatttttcaatatccataagataactttaaaataaatatattattaaaacaaagaaaatatatttacgttatacatctttaaaacctaccttgcttctttacaattttcagtttttcctctcttgtttccattctcttctcctcactttacctttttcctcagcatctctttacatatctgctgagcttttttatttctctctgctgcatatgcttttgaaaaagcataaaaatactaatttgttagratttaattaattcgagtcttaaaaaatgaactataattcactcttgtaagtggaggtggcatgaaatattgtttatatgctcttaattgttgttagagatatttgataatggcaagtgagaatttgagatagttatttaaaagattactactaacattttgtttgaatttttgaaagtttcccagctcatagggaagtgatgctctccatgctgatgcattcttcatcaaaggaagttttccaggcatctgcgaatgcattgtcaactctcttagaacaaaatggtaagcagtgggccatgttttcaaataaagggaaacacatttttgtggtatttttaattatagaagctatatactgtgaaaaatttacataatttataaagctatatattgtgaaagatatctctatgtgtagagatgtattgacatatggattatgaatatataggtaaaaggatgaagaataaaataaacatttgttgtatatttttccggacttctatgtgtaaactcacacatgacatatacaaaattttatgtattttgtagaaatgggatcatattatactcttttataaccaaattttatttattctcttttttatgttgatacatgtgtattctcacattatcattttatttttaattttttaaattaatttttgtttttagatatggtctcactctgtcacctaggctggagtgcagtaccatgatcatggctcactacaacctcaaacttttggactcaggtgatgctcccacctcagcttcctgagtatctgggactacaggcatgcactgccatacctggctaattttttgcagagatggtgttttgccatattgcccaggctggtctcgaattcctgggctcaagcaatccatctgccttggcctcccaagtgctgggattacaggcatgaaccactgtgccyggcccaaattataatttttaatagctttgtagtttttcagtgcttgcctgtattctgttttatgaaccaatttcttactgatgaagttttagtttgtgtccagtgggatgtttctggaacccatagtaaacaccagtgatcactttcctcctctgttttcctttatacatkgttcctattattttcttgggaaaatttcatagaaatgcaactgggtagagagctattcaccattttaaaatctggtaaaattgtctattataaatttccacactatacttttttaaaaaatcgttctttaatgtaattcttataaatcttatagctttgtataattatgaagagaaaaatggcttgtatccctttagaaagacatgagttttaagattatggttcaggctgctcaaatttcttcccccataaacaggaatactgccagaaatccttaggtgaaaactcatcataaaggcattgggacttggcagcttttgcaggacatttttagagggcaaaaaatagagaaaaacactgaaagtcagagacagagaccagtgtaagcatcagcttttaatagagaaactgggtagggtggaaaaaaaataaagcaaccacctcatgcatgtttctttatattattattgaagtcaaataaagaggaaaatcatttcttcttcctcttcctcctttttcatctcacctctccaatggcactttaataaaacgcttggagtggccagggcactgacagacagacaggggctgctctcaaggataatgagtcaaaggggaaggagagggaatcgctgttctcgaatctctcttattctactgtgcagttaaagaggtctggacagggatttcactcctgaaaatgaggactggactttgtggcttctgttggggcacctttagagtggaggtagacttttactatgtacagacaacattgtgttggtgacatcattcataaccacctggaaatctcctttgatatgcaaatcaaacaaccataactttgtgaaatttcgactgcttcctattgtggtgtctgaggactggttacattcagagtccaccctgatgtctttgttcagttttctgctctttctagttccttacttctttgttcctgatcacctgtcaagtaaaatgtcctcagatccttttgtattgtctttggagttctgccttaataaagcatgaagaacttgagtagctcgttcatcaactttcttgggcaatttctcattgaaagacacttgggtgtctttgggtgtgcagagctgagcatggctttatgtttttagaaaaaatggctacattggcaggcagaagaactgcgtccttggaatcatggaggtcccaaggttgcatacattttgtgtgacatttttcctattcaattaattaactaatatttattgagctcccaagtgtgtagtgtctgtaggcacttgggatgcattcattaagtaaaaatcccaggctcatggagtttaaactgtagtagggaagataataagattaactaaaatatgtaatatttgaggcagttaagaataaaaaatgaagcaaggaaggagaatatgatatgttagacatcagaggagatgaagttgtgaataggcagccaggaaagaaggtgactattgagtaagayctgcagggcgtcgcatattgttttttgcctctgaaagcagttaatttcctgttaaaatggagtggatgagatcaagagtattacgtagatagctggtaaatgcgatagtgtgtaaaatgttctataaagtctaacgtgactttatgatgaaatttcttcttctaggtttattgcttgcaattttcaaaycacacattgggttactgtctaggatagtgattcttaaagtgtggttcctggaccagcagcatttgctgggggaacttgataaacagtgtaaattcaaggaccccatacagaccttctcaatcacaaaccctggagttgagacccagcaatccatgttttaacaagctctccaggtgattctgatgcacactaaagtttgagaaccactaacccagtgtcatttttgtcttttaaagtgtcttcttggctagaagctagccactttgggaaaggttattacaacttctgatgtgatcaagcaaagtaaccaactctttattgtatcttaatatgtgatattctgaatgtgtttaaaaggtatgagtttttcaggctctggcagtattttagaatgtgtatgtgatttctatttatttccatgttttstcctatcttcttaagatagactacttattttaaaagcagtacttaagttaaaactttttatgtttctttttctgccactttcaaagtgttgaatcacagtgtgtaatgttggaactgatatttttatagcggcttcaagacaattgatatttatgtggaaacttgaagacagtaggtttatgtttagtgaaggaagtttattacaaagaggaaaattggccagttgtggtggctcacgcctgtaatcccagcactttgggaggccaaggcaggaggattgcttgagctcaggagttcaagaccaggctgggcaacatagtgagatcccctctctacaaaatattaacaaaaattagccaggcatggtggcacacttgtagtccctggtacttggaggctgagacaggaggatcacttgaggccaggaggttaagactgcagtgagctatgatcatgctactgcactccagccttggcaacagagagagatgctgtcacaaaaagaaacaccaacaaaaaaagaggaaaattattccttaatcattattgctggaatatagttactttccacaaatagtgaagtgccagttgtaaagcatatytatatgtttcctagactttggcattactttgtgaaaataactgtaattacttatgttctatgtaaatgctttccattcatttgtatatgatggcatayatagaaattataatgtttgtaaagtccactgggataaatggacaaagcagctraaggctgaaagcaaccaagccttttacagccccttcattccccacactcccaaaaagctgagtgaatggtcgatacctccacatgcttataactcattcccagcccaccagtgtctagcatatctggttagtcttagctttatataagtgcagttatttgtgaacttgttttaagtattggaatacaatttaactttcattcttattttggagaccattatttaaacagatttcttttttcctgcaaaaacactcttttcacaatggacagagacacggtgattacattaaaaccatctactctatgaataaaaatgttaaaaccaaaatcccaacaaagggttaataaaggcaaaaaaaattggaaatgacatgtgttttaaagaaataaacatgaattatctttaagctgtcaatgaactataaattatgtgtgctcttgtatatgctttcctgtaaatttggactatattaatattctaaagcttatggtaaaattatgaaaatatgctttcatatctataagtaacattttaaaaaatctcagttaatttcagaaaaatactgttatcaaaaggaatacacctgaatgttttggagttaatgcagaagcatatacattctcctgaagtggctgaaagtggctgtaaaatgctaaatcatctttttgaaggaaggtaatatagattcattaacttgtacagaatatatcatattgggccaggtagaatatcaatatttcaagcatatttctaacaatgaaaagaaaaagaaaaacataagacacttgaaaactgaagcattttgcaatgtaatctcgtgtcactagtaccatagacttactttatctgaacactgaaaggaatggcaagattgtggaaacatgttgaaggtttgcttttgaacctgatgcttgatgttgactatattttgaaaagtggtaattgtatagcacatagcatacagcagtttttctaattattgtgtgtgtgaaagttataaaagataaaatcagtttatggctaaattttgctctttcacaacgaatatattattccttcatctgaatgaactttgtcttctcttcctgctctcaatccttagttagggaaaattttaactacatctagtccaagtgcagagatgctaagattatatagctggcggttagtggcacaacagagaccatatcctttgatctatgtgtggatggtggtggggcagggtgggatgaggtgggggtgaggggtggtaggtgtgggcagaactctcatgtgtaaaaaaaataattggcacagaagttgcagtgaaaactaattttgttcctggttttgccactaatttgagccaactgtttcatctctaaaacttcacgttcctcattgataaagaggaatgataataacaactttgaaagttgtaagcttagaatgtaaggattaaataaattaatttttacaaagggattaggataatgcctgctgcattttaagcactcaacaaattgtgtctattgttgttatactgttactaagtgtgaataaatgaagtgcatatagcatgaaatgtagcgtaactgcagacttgtaagaagtagggttacactgtttttaacatcagtctaactaatctatgtttatatatctttctaagctgtatttctcttatttaagtgttgtttttgaacactgagatgaaaagtttatcttaaatgttgattttaatggggccggaagtgtgcaaacctttacaaatgaggcaaaaacacagcggaataaactccagtctaggattctgtagattctgggcaaggcatttaatgtttctcgctgcatgctcttacgtaaaatgtgtacagttgcagccctggagattccgcattggctctgacrgtgtgtctgcccctacagaactcatgtgagtcgagagactgataagtaaacagattattataatacagtctcagaatgcagtggcagtagtgtgtaaaagacgcaatggtaagagtagagtggacycagctggggttacccaaggaggggaggctccaatggagggatgtgtttaaactgggactttaagttggaaaagaaggaatgtatctcagtgtccacagaaccatgcaaagtgagaacatggttctgatatgcacaagtttcagttaacaagcaaagcaaggattgactgtattaaagttcatagtacctactgcattctagtcaagtgacatttgctcatatgtaaaagaaagaatagcttaaatacctgagagaaaccaagactgtaaaacaaattaaaaataattaaaaataccttataagaagtccagtgatgttaatctggaagaggaaggttcgtgtgatgtaaagaggccttgtcttggggtcagacaagtttgggtaccagccttgtctctgtcactttctagtgataagacctgaatatttaacctctatctgtctaagttcttcatgtagaaaatggggataataacacctacctgctgggattgttgttattgacccatcgtaggtcagaaggatgttgttagttttatgaagtgaaataattcccggattactatgaattctatcttatgagttcaaagtttagacaattaaaattatgtatgctcatactactgatttcaaatgcattttcatatagtctttcctgataaaatatattggttctgccctcctgtacttatttcaatttggtgtttataccattgaatcagatcagtctttcaataagcatgccaattttatatccccagcaacacttccctggatataatggcagcagtggtccccaaaatactaacagttatgaaacgtcatgagacatcattaccagtgcagctggaggcgcttcgagctattttacattttatagtgcctggtaagttacatagttgattgtgggaagagataacaatttaaatggatttttgatttttcatgaaatagcaatattctaggcaaatattaaaagactagtttctgtcgactaaatgtaaatctttctgttaaaccaaaaagaggttaaatatgatgcagaagagtcacttagattaatttttataagaaagcaatatgaattcagtaatttatttatacaaagtaactacaatgtaaaatgtggagcttttatttttaaggagggtgttcatctctgataattcttttctatttttgttgccatgacytgagttcaagctttttttctcttgtttgaattgtactattagctaattttcatacctgttctcttccttcatttctatccttttcttactctatgattgaattaatctttctccaatgtggcttgtactcatttacctcaatggcttccaccctccacccacctttaattgttactgacatctgttatcaccttatttgttctccaaagcccctttaaaacacctatgtctgtattcatccaacacatttattaagtgcttcttatgttctaagcactgtgatgctgttaaactttaaaagatgaattggaaaaaaagcacaactgtactattataggagcttagaggtagatggaagtgtaaatagataattaacaggcagcgtgagagaggcgatgatagatgcatatataaaaggctttgagaatatcgatggaggcacaaataatttcttcaaaggagtaggacagagattgtaatatttgaggtggaagggtagatagagctggcctggtagaaaggccaaggaagacatttcaagcagaagaaagtgcacatggtcgggggtgagtgaggcatggaggataaggagaggagtgcttggggatgagtgtggaaggaaaggctgaggcccaaagaaaagggccttgaatgcagtgctaaaaattttttgccttttaaaaatggaagccaacccaagtttattaaaattgtttgcagattgtagtgtcacaccgaaatttgcaactaaagacaatagcattgtggtgcagaggatgatagacagggagagagactagatacaaggagattgggttggaggtccatggtagtcaagtgagacccagtgaagggacccagcaatggaaacacagatgagagggcagattggacagatggttgggagatctgtttgatgtgacatcgtgatccctaagtatgagggatgatactttgttctgtgaagttcccaatcttttgaagtcatttttgctttgttcttttaaaatgaaatcttcctaaatctatcattttctctagttatataggtattttgtttctctgtataagagtattactcaatataaaagttttttcaaggacagagctttcttcagtcatttttttctgggccccccagtcctctggtggctattcaatcagtattttaaaaattgaatcatggtgtcctattcatagtttcagcttagttttgagacgtaatgtaacagatgtaattttacttgaaaatattattgcatgttttattgaattttatttttagattgtaattaaaaacaataaaaatgccttttgattatccttaaagttgacagccttattcttttgagggaggttttgggttttaaagataaccaaaggacactcaaaaaccgtttctgttagttaataaaataatactcttttagtccaaaagcaagttttgaatacagtatttcttttcttttattgttcttaaactgatcctgaaggaaaattgttagttaacaatcaatcagatgtattatgggtgcccttgaaaataatcacttgaggactgtacttaatgtaaaaaaatacattttataagcatatcagtatgtaagtacattcttctagtaggtaaaggcttaatcatttactgtatgctaacatattatactaccacagtacaccatactgtactgtacccaacgtaatgtaccatgccgtgcagtaccgtatcattctaggtatcaacaagtaactatggtagcaatactccagtagttttgaggttgaatatgattctggtttgaacatgttaagttgaggttcttatgagatacctaggtgtacatgtattcatttattagctagattatattcaggttttttagtggcaaagatgtacattatggcaaatgtgtataatttagggtccaattaaggatagcatattgcatctagtgcatatatcttaagtttctttcaatctattactgtactttttctcttctactttataataacttgttatatagacattgagctggttgctttaagaaaataataatgaagacccagttactttaataaaatatcatttgacttgtttcttgagttactgctagttttagaggaaataatgtgaaattctttaagaagggatataggcaaattgggaagtatatagaggagagtgattagggagataaaagcacatcaaaaagagcaataagaggaactgagattgttttatttgaagaagagatgactcaaagggatatgaaactctattcaaatctacttacttataaccagtaacagtaataataccaaacaatatggaggacttaaaaagtattaggcattgtttgaagtattttaagtatattatctcttctgattctaacagcactccatgaggcagatattattattattattattttggtattgtatggactrcaaaactgaggcatagaattgtagagatttttaaggtcaggcctgatataacagcaccagattttcagcttatgcaggctgactccagagtaggcattttaaaataaatatttgtgcaacaatcttgtcctgaacaactgttgtatttaaagcactatgtctagaatccttaaggtatcgggagatgatgagattatggatactgctctcaaaaaaatttacagtccacacgacctaaaggactgttatgtagaaaggaaattatatccatttgaatagtaggacctcaagtgatagaacaaagactggagaagaaatttacaggaatgttcatttggtcttaatttaaggaagatgttaaataagacccattacatgtagcatgatgtttttactactcaggccagttttagtggtcacatcttcttaaggtgtaataggcagcctcagaagttactgtggtcttgctcactggaaatgatacacagacagtttaagggacttgccccagaccacacggcaagaggtgaatgtcagaacctctttgagtacattttaaaataaggactgaaagttggaggagggtggttatcaaggctgccttccttaccatagtattcccagcattaacaaaatccttggcatgtaattggaattcagatgcttcttaaataaatgaaaagcctgttgtagccagcttacagtttgcattaatgcagattattaaagtggaagatcataaatgattttttattaatatttatgtctataatcttaggtttggaaaacattattcattcataataattttaattatatgttacattaccacatttttgacttgtagtgtttttagcatagttcagctacagtgtagcttaataaagaatatgattttttaaaatagcaatgctattatatagcctttacagaacttctaaaaaatgacatgttctctaccaccttaatactgaaactcaaatcttattttttgctacgattattccagctactcttttttgtctatatttcatttctgcctttttatgttgtggtccaartaactctgagcttttctcatgttgtccattgttgcataaaaatcttccagcatcttaaagcacagcctactcacacaaaaaagtgattgtttgctacagaaaatttcttcaccatcgtaattttttgctacttcaaattcagtaagcattcttacacattatatttattttatattcagtgatgaactatttttatagattccttaaaatttctggttatttatttgataaggaaacatgtactagaaaaaagtacaacacatatattgtgagattaattatgacaatttctagaaagtaacagtctgttcractcaaatgtttataagaaaattctttctttatttatttatctgtgcatttaggcatgccagaagaatccagggaggatacagaatttcatcataagctaaatatggttaaaaaacagtgtttcaagaatgatattcacaaactggtcctagcagctttgaacagggtatgttgaatataagttttctgtatttatactattaactaaaatattaaatttggagaactaggggsgctttttcagtctaagttttctgttctccgtttgctatgataggaggaagtcatgtggttagagacataagatgacagtggggatgtgggaagtgaaaagatatgtactaagctaagtccagctaagtgtattatcaattatagatgtaggcaagattcttttgattgccagtaacataaatccactctagtttgctcaaccagaaagagaaccaaagagccatatatgcagctagaccttgtgagtcatgctgggtactatggctgctgttttctctttctgtcctctggctacttgtctttcttttctggtctcatagtatatggtttagcccatgaagacataccagtgttaacagtaaagtcttcggctgggcacagtggcccacacctgtaatcccagcactttgggaggctgaggtgggtggatcacgaggtcaggagttcgagagcaacctggccaacatggtgaaaccctgtctctactaaaaatacaaaaattaactgggcatggtggcacgtgcctgtaatcccagctactcaggaggctgaggcaggagaatcgcttgaacccaggaggcagaggttgcagtgagctgagatcacaccactgcactccagcttgggcgacaagagtgagacttcgtctcaaaacaaaaacaaaaacagacaaacaaaaacagtaaagtcttctttgattccctacgctccttttcattgttctccggagaaataacctctgaaatgatttggtatacattgtttccattttttagcatttacatatccatgttcctacattataattaaagtatccataaatcatactgagtatgaaaaagagaagaagggaattacatttaaattgtgtaatgcaaaaagtattggtggaattaagaagttttggaaattttgcataagatgaattggttctttattaaagatgttaagaataaagacataattagtgtgaacatttttataaaaggaggagcctatttaaaataattaatggaaatgattccatgtgatttgatatactttgatgaatgtcataaattaattaaagtggcttccagagagatctcccttaaaaattcattttaaattgaactttatactgtcactcactgcctataatatgtttgagtcatttatactcaaactttaatacaatccttgagtatggcaakaatttatgttgtaatgggttaaatttatcttgagaaatatttgttgaaaataagtatatggaaggaaggggttaggcatttagaagataaataaatatgctttgtactcttctctcctgaatctcataagccggttgttgatggctgttgtgaaaccttggttcttttctttaaacaagagacacacagcagaggagatgcagcatcgagtaatttattgcaaaagaaaaagaatattttgcaagttaagtgaggaatagacacttataccctgacagaattcagggtgggcttactagtaaggatgagacagcgtaaattggcactaggaagactccctttgtgggagttgtacatgatttttcataagtgggtgggaagaagtgttactagtaagcatattctaggttgtcctctgagtgaacatgtgcagtagctgtacatgcttgttcatatatcgcatgtctcataagtatctgaaatctccacccaggggtgtgtgttttactattataatgagcaaagggtcagtctgaggacaaggaaaatcaaaatgtgcatgctccccaygctacctgacttcaaactatactacaaagctacagtaaccaaaacagcatggtactggtaccaaaaaagagatataggccaatggaacagaacagagccctcagaaataatgccgcatatctacaaccatctgatctttgacaaacctgacaaaaacaagaaatggggaaacgattccctatttaataaatggtgctgggaaaactggctagccatatgtagaaagctgaaactggatcccttccttacaccttatacaaaaataaattcaagatggtttaaagacttaaatgttagacctaaaaccataaaaaccctagaagaaaacctaagcaatactattcaggacataggcataggcaaggccttcatgtctaaaacaccaaaagcagtggcaacaaaagccaaaattgacaaatgggatctaattaaactaaagagcttctgcacagcaaaagaaactaccatcagagtgaacaggcaacctacagaatgggagaaaatttttgcaatctactcatctgacaaagggctaatatctagaatctacaatgaactccaacaaatttacaagaaagaaaaaacaaccccatcaaaaagtgggcaaaggatatgagcagacacttctcaaaagaagacatttatgcagccaacaggcacatgaaaaaatcctcatcatcattggccatcagagaaatgcaaatcaaaaccacaatgatataccatctcacaccnnnnnnnnnnnnnnnnnnnnnnnnnnnnnnnnnnnnnnnnnnnnnnnnnnnnnnnnnnnnnnnnnnnnnnnctgcgctatcagatggtacagtagttcatcacacctatgcttattgtggcactattcacaatagcaaagacttggaaccaacccaaatgtccaacaatgatagactggattaagaaaatgtggcacatatacaccatggaatactaagcagccataaaaaatgatgagttcatgtcctttgtagggacatggatggtactcagcaaagtatgccaaggacaaaaaaccaaacaccatatgttctcactcataagtgggaattgaacaatgagaacacatggacacaggaaggggaacatcacactctggggcctgttgtggggtggggggaggggggatagcatttggagatatacctaatgttaaatgacaagttactgggtgtagcacaccaacatggcacatgtatacatatgtaactaacctgcacgttgtgcacatctaccctaaaacttaaagtataattaaaaaaaaatgtgcatgctccatacaggggcaattccctactggagatagctttgcttaaatgagctggactacaatgcaaatgctgaaacttactatattgacagtaagattgccacagttgccgcgtcctgaggacatggttacttccttttaatacctatcctgtctcattgtgagaggattaacaactgtgcataaaaccagttgttctacatgagcacttaggagggataccagcattgtgaacatagtttaagtacgtagaggagggaacagttaagtttattcatggtgagtgttggtgaaaagtggaagaggtaccaaaacagccgtatagataacyggttccagttagccaacattctctaaagttattagagaagcctaagtgaggtgtaacctcagcagtcgggagccaagagagcaagtaagtgctgtgatgtggagaaaatcactttgttccawctgagaagaaatggttgagcactgcttttcccccatgccagtactgacgcacagcctttcacttagcactgattatcgataggggtggggagttaaggtatggggaaacacaagtaacaatattttatttcaaaaacctctccactgtaattcccctaatccttcatcatggttgaggaaaatggctctaaaaaatgagagcaattactgtagctccaaaattctgtgattgcatgtcttactctgaatagcaattacaaagcatcagaggatttaggtccaaatattgcagacacaagaaaatgaattacattttaatacatctaaacttggagagcagagttccaaataaggtagaacttgagattcaactctgatttataaagcagagactaagaagagtatttataaagcgaatccatgtttggatacataaaagtgcaataaaattcaagctgaagttaaaatctctgtctagaacagcgatgttccatttatgcctgatccttttagcttttccacagatgaagactttgtcacctgttccagagagatatatttgttcattattgtttccagagagcaaaatggaaaataaactctgcacattttggccgcatctgtgttttatatgcggtgacactcctgttctcttcagtgaggaaatccagtaaagtaaaaccagtcttctgatgaaatgggcacaaatcaaagaacttgtgagcttcacaaaaaccttgaagcaaaatataccaagcttaaatattgaatgtattgatttcagtagtcaaaaacagagctcatctgcaaaagcaacaacaacaatgacaacaacaaattacatataagtaaaatttaaaaaaggtttacaggatgaatatacagaaaactatgaagcttaggggtagagaggagtagttgaatatatgaaaagatacatcttttttgatgaaggactaaatttttaaaaatgaaaattgatctatgtttatgaaccattagtaaaaataacaatagtattttctggaactaagtaagctagtgtaaaatttgtatgaaaaaattaatacatatgagtaatcaggagaattttaaaaaagagtgttgattcatatggcctaactccaaaagataatcaaatgtattatacaattttagtaattataatggtgtgatactggcactaggggagagagatcagtgccacagaagggtggctcaggaaatagactcaaataaaaatttgtaatgttatgatattcctcgactgcgggaggaaaatagattactcagttacttgtgttggaacaactaactcttcagccatttgggaaaagcaaagaaagctgaatatttatcttactccttttgccaaaacaaattacagatggatgagatttaaagtctataatgaaattggtatatgtacatattaaaagtttcaactataattgttattaacgtaaatgacaacggaacaccttgttggagggaaatttggtaatatctatcaaaattaaaatgccatgttttctgatcagcaatttcattctaagaatttttaatgtagatatacttgctcatgtacataaagattattagacatgaatgttcactgtggcatgattcgtaattaaaaatgtggcaacaaactaaatgcttacatggtaatcattcatgctgtttgccagatatttttatttctccaccttgtggtgattctggcatagtatttagtagttaggttgaagcatgtgactaattttggtcagggagttgtaaatggagggaatagctggtgagacatcttgcggaatactgtctcaggtaccatcgtacctgcagtgtttgagatagtagttgctccatcagtagaggtccctgagggactacaacaagcagagtcccctcctgacctgcaacacatatgtagcatgagcaataatggaacttattatttttgcaccctataaaattttgagaattgttactgcagcttaatttaatctttcctgacaatacaatacctatcaatagagactaatcagataaattataccatttccaaattgtatcatcctgcataaatattaaaaaacaatgaggtgagattcctaatgtgctgctatggaaaaatcttcaattttctatgtgtacgaatgtatttcccaggtattcgttttttccttcctktatgttgacacattatgcacacttttggatgaaattaatatatttccaccgctttatgtcctctccctcacttttatcacccaattgtagcaaagtatatgtttgcttttatagctttagctatataaaattttctaatagctaagtttgtggttcctggaattaagatatctgaatttaaatctaacactactacctacagactatgcaccctggacaagtacttaatgtcttggttttgttatgtataaaatggagataataactgatttttcacttagagttgttgaatattttataagataattcatgaaaaagtgtsagtataatgcttggcacatagtatgcgctcaataaatgttaatgttattactattagatttaaaagtatcttttgacccctggctatagaagatgaggaaatcagagtatttgcacttctaatatctcctgttttcccacctacttttgttcaataaattaactccacattggcagggtagataatatttatattcagctttctaattatgctttctaagtttgtgtttatcttactcctaccgttatttggaagcagtcttcatctcaagtccttttgttactgttttttcactcatcttttagttgtctgaatttctttagaaaagtttaattccctgaatatttaatgtttatattttgttgttgtttttgcctttatatttggactcctaaaaaaagttttgttggttgtaaaatattgtttttttttccttgaagtgtttgtaggcatttcactgtgttctagtactgaatgttttagtggagaagtctgaggccagcttcatttgtttcttggatatttttgcccagtgctgaaaggattttttctcttgaaatccatccactttattagggtatatctcaatgttagtcctgggatatggtatcctcattctagctatacattcaacttttttcctggaaagttttcttgagttgcatctttatatacatatacatacacgaatacatatacatggtaaagatattaaggataaagataggtgctttataaataccaatttgatataattttggcatgaaaaaaagcctgtggtgcattctgagtttggaagtagaactggatatacttacttattactattgtttttaatacaaaaatggagacagggtctcactatgttgcccaggctggtctcaaactccttgactcaagcaatcctgcctcgacctcccaaagtgctgagattacaaatgtgagccaccgtgaccagcctaaatatctaaatttttctctttcattattttagctctcttctttggggctatcagtcatatgatgttggatctcttttgccttaatcttctaatttttcaaagactaatccagagaccactatctatcaccatgccattactcatagacaagggacatcattccacacatttagcttatttgtcaaaatcagagatgggatttataaaagaaaaagaataaagggagaaaacaaaacacaaattatctgggaatgcgagtctgttttcctttctttggctaatctacttacctagtagctaggaaagaggccagcatgagtatttttccattgagctggctagctcastcattggagaaaccatttcaatatttatggattctctgaaaaaaacttggagagtaaaaaagcataggtggtaggatgctgccatccttctgttggcatctccagagtttcacttgaaaaacacctcctaagtagacactgataaattgattttaatccctatttgagcaccaatgcaatacattactatttcaagatggagcattagataactaaaggaaattctattgtgggcttgtaaatatcatgatagtcatacctatgtaatacatatatgtatatataaatattaatttttaaacatttacttagctattaaaaatcaaatgctcatatttaaaattattggtttattaatgcaccatcacatgttatcatgtgatactctgaattctctttttgcatagacaaatcagagattacctgctgcaagtcattagtcatcattaacctgtactgaaatggttagagcctaggggagttccaggtaaaaggaccagtaatgagtagaagcttgttagatgtagagatattgaggacagagataggtgctttataaatatcaatttgatataattttagcataaaaataagcctatgatgctctttgagcttgggagtagaagtggatatgtaattttcagggcgtagtataaaatggaaatgcacactccttgtttgaaaattattaacgattttacaagggtgacaacagagcattgaagcaagtgctctgtgagcatgaagccctgtgtgaaatacacacctgtgaagctggccttgcctgccaaacaggaatgctggtactgttaatcaaacagaaagttcagaatgacaatctgacttttttttgtagaagatactaaacttttggccttgaatatctgaatttaagatactggtatcaagccaaaagaaatttgggcttagaacttgaaagatttaaacttgtgctttgacttgtgtgctcacagctctctgtgtcacaatttttttcatctgtacttcgggacaacaatagtgtgtcgacatcacaaaggttttgggaggattaagtaggtgaatacatatgaagttcttaaaagaatgtctggcactgagtgagtgctacctcggttttggcatcgttattgtggtcattgctattgttattatgacttgaagtcatattagtgtatgaaatcccatccatgaatagaagacagaaagaactttgggcagggtttggaggtaaaagaagacattgtaaaggagatgggtaaaggaatgattttaaagactgagaataattaggggagtacgatgtcatggaaattaagggatgataagcaccaattaagttgttattggacttttttctttgaatggttcaaattcagaataataaggaaagaagtctgattatacgaaattaaagggtagggtgactgtggaggtagtgggagttgacttttctgctaataagtttagaaataaaggaaaaatggtagcttgaggaaagagaggagcgattaagggaaagtctctcgttawctcttgtttttcatctctgaggacagcgcttagcccaaggcctgacctgtgatcattactctctcaaggtttattccatggacagagctatctcatttcatgcttataacaaccctacattattagaattgttttagagatgaggaagctgagacacacaccaaaccagccttccaatttcactttgcacaactttgaatttctttatatttcttgaataaaagttccactttttaacttaccacttcttagcagtcattgtctaactgagtaattgttacttcattcatttaatggttctcagattcgcataatttgaacctaaatttaattggcctccaagctgatgtgcttacagaaacagtgacaggaaacaaaaatgtcaagggagactatgtattattaagatgataaatgaaatgatgtccaagctgagcaattaaagtgtgaagtagaaggacacagggtgagaaactgatgcttctcctcagcctctataaaaaagatactgaataaagataattgagaggcattaggggactagactgagaaaggattggaaatctgttcactgagagtacagaaatgaggaagcttggaaggcagaagattttggtcaaagacgtctggcttgaagctatttcagctctttggattatctgtggtggaggccatcacgtctttggagtggaggtaccatgaaactagtgtctgcaaaacatcatctaaatgaaagcaaaattcctgagaaggatggcactataatttttaaaagaaaagctatgagttaagcattcatatcaaggtagatgtttggagtgtattgcttgtgtgtgaaaaggcagagatgaccagaataagagttagaggtatgctgcgttttcttcttggttgatgagtaggatggcctggacaaagaagtgacctctagtaaaataccttcatagtgtcaaatcatctggaggaaattcagattaaagaggttggatgatgtcgtaattaagatcctgggcttttaaggtggacacatttatattcaagtcccaggcccaatgcatattagctctgttacttgagcttttatttctgcatctttaaagtttggcaaacctattacatgaagctgttgaggggataaatgaaataacgcatgcaaagcacttgcagtaaagactaattatcaatattttatttgttaagaggcagcattgcgttttactggtcaagtatgtagactctggggtgaaacatatttggtttggtttcatctctgcaatttatagtttgtgtagactttgagaatagttctcaatcattctaaccctcagtgaattcatcttctaatgggagtgatatcagtatggatttcatgagattatgaaaagaaaatgcctacaaagtatttattacaatgcctggcacagaacaagctctccttaattgtaaaaatgctaactcttattcttcataataaataaaagtaattaatgttatagaaaacaaaatcaaggatactgatttatatttggattacttgatttatattttgtcagtctataactggtcttaactaaggtaagtattaagatctcatttttaacagcgagtattcttttgattttagttcattggaaatcctgggattcagaaatgtggattaaaagtaatttcttctattgtacattttcctgatgcattagagatgttatccctggaaggtgctatggattcagtgcttcacacactgcagatgtatccagatgaccaaggtcagtacaatttgaattcaggatttagaatagatttttgtagggcattagctggtgactggatgtctttaaatatttttcttcagttttgagatttaaaacaattctttttttttattttcctagaaattcagtgtctgggtttaagtcttataggatacttgattacaaagaagaatgtgttcataggaactggacatctgctggcaaaaattctggtttccagcttataccgatttaaggatgttgctgaaatacagactaaagtatgtgcattatcttggaaagaatttgggaacttgtgcgaatttcacttttggagcagtttgtgtaattcccactttgcatgaatggggtattctagttaatggaaaaccatttatccttttgtagtattttaattatacaagcaaagaaaattggattgaatctctaaagatccagtgtttcattatgaaatctctaaagtcagcatggttattcaccatttatcttgcccataaaagttcagagaatgtgctaagaaatcccagctagctgagtttattcgcttagattttagataaatagaatttataaatattccaaagtttgtcactctctgggttttattgcaggttgcttacctttagtaattttgcttgttgatttttttccttgcagtgaaaaaatgtttttaacatttttcatcaagcaaaatttaaaacatgatatataataactgtctttgtaaggaattcaagatactggcctagagttagttcacgggagattaagaataaatttgttttgttttgttttttaattgtagcaaaacaaatagtttttcttcaagagtttctgccttggttgtggagtttgcaactttcataaactacaaaggaattttttttttttttttggagacagggtctcactctgtcacccaggctggagtgtagtggcagatttcagctcactacaacagctgcttcccgagctcaagtgattctcttgcctcagcctcctgagtagctcagactacaggcatgcactcccatgcctggctaatttttgtattttttgtagagatgaggtttcaccatatttcccaggctggtctcaaactccctggtctcaagcaatctgtcctgctcagcctcccaaagtgctgggattacaggtgtgagccaaggtgcccagctgactcaggaaatattttttgtaactggcagcattgaccaggaataaaaatacctggtctctaatctttgcacagacattatcagtaaatgagagaatatgtgtaaagttttttaaaaaattataaagttatgaacatacaaaattcttagattaataacaacaatgtgttttataactgcttttcataatgtgcctcaggctaggctgattaaaccaagataggattgattaaaagtaatcttagggaaagggaaggattttgtgccggtatggaactctcagttactctggattaattcatctaggcataaattttagaatctctatagtagagtttatgarctaaatctggcctgccaacatattttatttgtccagttcagggttttgctttgttttttgagacagagtctcactctgttgcccaggctgtagtgcagtggcgcagtctcagctcacatcaccctccgcctcctgggttcaagcaattctcctgcctcagcctccctagtagctaggactacaagtatgcaccaccatgctcagctaatgtttgtatttttagctgagatggggtttcgccgtgttggccaggctggtctcaaactcctgacctcaagtgattcactcacctcggactcccaaagtgttgggattacaggcatgagccactgcacccggccttcagttcagtgtttaaaagtttttaattcgaatgacgtactttctgcacatttgcatggcctgctctgctgtagcattcacttgttttcagagacctctgctctagaggcaggtggatcacctgtccctcagacatacataaattaaggctactttgcttatcaaatattagtattcgtagatactcagcatcataagagttcgaagtaataattttaatatttagatgacgtaagttaatttaaaatttttttgagatggggtctcactctatggcycaggctagagtgcagtggcacaatctcggttcactgcaacctctgcctcctgggcccatcctcctgggtgggctcaagtgatccacctcagcctcctgagtagctgggactacaggtgcatgcaygggtaattttaaaatattttttataggcacaagattttgccatattgtgcaggctggtcttgaattccygggctcaagcaatcccacagtgctgagattacaggtgtgagccatggtgtctagccaattttattaatatgtaatattagaggtaataaaacattaaaaagttaagatgatccttggtggctttacccaacctaaataatactaaagtcaaaagcccaatctttcattaaaacatcacatgagtgaagaggacagactctggggatgtgcttaaggtggttctaaaaaagtaacggtgttctttataaataacttattattagaatgtaatcctcagagtgccctcagcgcttctcaactacactcaacataaatgaaatctaggagtccacactagcctttctgagataaacatttcggaagacagcgcaaaaagctgggggatatgctaggctctctagagaacctactgttcaatattataatacaaatttttactctattgacctgtttggatgtgtagttctgctgatccaaccgctttaatcctgtttaatatctgggtttcatcctataactatggctttagacaagcatctttgaaaaccaaatttgagggtattagttctttttcctgctttgctactgaatggtttgttaactagcattttattctctgtgcctgctatatttcttagtcatgagagagagagggagtatttatttacaggataaatactttaaagcaccaacccaatatatctatagttaaatgaacatcctaggtattgtttcatatacaaactctctctgctttatactgtttattcattttgcctgtaattgcttattttattattttttttcttatacttttagggatttcagacaatcttagcaatcctcaaattgtcagcatctttttctaagctgctggtgcatcattcatttgacttagtaatattccatcaaatgtcttccaatatcatggaacaaaaggatcaacaggtacagtgtttttcacttgcatcctaaatgttatgtatttatctgactctaattctcatttccactctttttagtttctaaacctctgttgcaagtgttttgcaaaagtagctatggatgattacttaaaaaatgtgatgctagagagagcgtgtgatcagaataacagcatcatggttgaatgcttgcttctattgggagcagatgccaatcaagcaaaggagggatcttctttaatttgtcaggtaaatattcaaggcctcacttttgtctttgctcagtattcttatagaatgtaagagccctgccattgtgtatctcttacttatatcatattattcttcactacagaaatttaccagtttattgcaattgtttgtgtcttgtagtagatttatagaattccagaagtaatagggtcctttaggtgttatccagtctaatctttcatttcatctgtttacttatcttgttaagttgataaataacttttcaaatgtgtcccttagtaggcatctctacaacttagtctccagatacactccacataacacatagttctaatgttttgataattttttaaccatttttttccatggttttagtttctttgcctagaaagttctcccctgagggctaccacacatggctatgcaggctgtggatggcacacttttgtcggtgccattcacagtgacatgagttgctgttggccaaagttgtgtaacactggtctttctttccttctctcttccctcctgaaccatgtaaacatrtatctatctgattgttctgctctcccttcaaaatataattcaaattatctttctttaaagccctccccatacctccaaacctccaaacaaaattaagatttacttcttttgtcagtctatgaaaatatatacatatctcttgtatacttggtgagttgtgtgaaaataacagtgtacagtgttcatctttgtatcattcagaatatcgagctcattgctttacatatggtgtgtattcaataaatactaggttcattgcttatatttcakatttgtattatttgtataagtgttagagtttatactagcattcaggtagcactatgtctattttctagaaatttaatatttctaacaaagcaattatgtagtgatttaatacacattattaaataatcaataaagtactatgtttgccaatagtttactttttaaaccttactgtatttaatatccctactgtatttaatatcccacttgcctatggattgaaatcaatttgttgactgttaagattaagttaatactaattagtaatcaacataaaaagaaaaagaatttgtaacccattttcatgcattacgtttatgaattaaaatcacataaacaatctaattatttaaatttagtcaaatttcttttaagcaagcaacaattaaaatagtwgctccgctttactaaagataattaaatttttccatcaataatttaatacatttttactgtgcatcttttgcatgcagattattgcattaattttaattgaaaataccraagaactaaaaagaaacttccccttctaagtccacattaaggaaacaacatacctaaaagcacctgatacaactgtactacattccccacaggaaatcatttctactattctttcaatttatccaaatctttctacccaacaggatttttactttattcctctttccatattcttttggacttcatatgcttagttttatcttttctttttaaaacgaaatcttaaatccaaggattatgtattaggtttaaagaatttatcccagttgtcagaggttatttatatctagcaaacaataactgctgattaaatcttgtggatgagtttgtcgtatgtaccttatttgtgccagagcaaaataaggtaatcaggactatttattcatttaccaagaggttacatattgaaggactatctagagcaagggtggagttgtgttagactttctgcagagaatttgataatggaatgtacatgattggtagagaagaatatggaagtttaatactgggtatgcaaatgcatggataaaaacctcaaggtaaaactcatcaaatcacagtggaaaaagtatagtgaagtctgaataaaaataataagaggctgggcatggtggctcacatctgtaatcccaacactttgggatgttgaggtgggaggatcacttgagccaggagttcgagaccaacttgagaaacatagtgagactccatttctacaaaacaaaccaacaagcaaaaaaccatgtatgatggcacacacatgtagtcctagcttcatgcagggtggctcatgcctgtaatcccagggctttgggaagtcaaggcgggaggatcatttgagcccaggagttcaagaccagcctgggcaacatagttagacccccatgtctacaaaaagtcaaaaaattagctgggtatggtggtacctgcttatagtcccagctacttgggagtctgaggtgggaggatgacttgagcctgggaggttgaggctgcagttagctgagattgcaccattgcactccagcctaggcaacagagccagaccctgttaaaataaaataaaataaaataaaataaaataaaataaaataatataataaggctgaggtgggaggatcacttgagcctaggaggtcaaggctgcaggagctaagattgtgccactgtacagcagccttggtgacagagggagactctgtctcaaaaccaaccggtcgggygcggtggctcacgcctgtaatcccagcactttgggaggccgaggtgggtggatcatgaggtcaggagatcgagaccatcctggctaacccggtgaaaccttgtttctactaaaaaaatacaaaaaattagccaggcgtggtggcaggtgcctgtagtcccagctacttgggaggctgaggcaggagaatggcgtgaacctggaaggcggagcttgcagtgagcctagatcgcgccactgcactgcagcctgggcgacagagtgagactccgtctcaaaaaaaaaaaaaacaaaaaacgaaccaaccaaccaaccaacaaaacaaacaaacaaaaaaccaacaaaaccaaacacttctatcatgctcattaccacctgggcactgctccaaatactttacacaatttaatccttacgacaacctacgaaaaggtccagtaggttctaatgttattcccattgtgcaagtgagaagctgaggcactgagggtttaaataacttgcctaagaacaagctcctggtaacagtgtgaaatctgcctccacagtgcctgctttaatttcttggctacacagcagattcatggtagtggtggtagtggtgttcattttctctaaaataacagtttgaataatttggttttgataatgcactgcatttattataaattagatgatcagagaaagattgcagggataagaaattatgcttttgataatctttagttatattcttaattttcttcattattatttaaatgtaaaaataaatatctgtgagcagtagtattttcctgtcatgaagctgaaattactttcataaatatgtgtgaatattctaaagagaatgactctgtaggatttaaagaaattaattcttatttttgctggcatttatttattttatcagattcactttctcatatatgtctctcttcatggcaccatatgcctaaagtcagcttggatagtttggatcctccaaggaaaattccttccacaaacatgtgcagcrcacagtgctagataattaatagagaatataaaatgggtttcctgtttcaagatggtttgtaggtctgtatgtgtagggcattgacaagagagtaaaacataaatcaccttagtacaaagtaaggagtgaatggcatatcttagagaaaaaaaagttactgggctataagagaaggcatttgtgagtttttccctccctccccgcttcccttcccttcccttcccttcccttcccttcccttcccttcccttcccttccnnnnnnnnnnnnnnnnnnnnnnnnnnnnnnnnnnnnnnnnnnnnnnnnnnnnnnnnnnnnnnnnnnnnnnnnnnnnnnnnnctccctattccccttccccttcctcttccccttccccttctccttccttccttccttccttcctcttccacctgccttccttttaattttgctatgagcccttaagaggattttagtaatttgctacttaaattaaatatatttgctagatgttgtgctaggcttcaggaatacaagttggattgcagtaatgtaaagccctttgcattctagcaagaaaacagatgggtatgtatgtttgctcagtkctacattaaatgaaatggatgggagccgggaggagaaatggtgtgtttggcctgagaggttagtagcaaggacttctctgcaagaaagtttgaagccaattcttcaagaatgaacacctttttgctgggtgaaaagtagaggaaggcatttggggtaatagaaatagcataaaaggtaatgaggtttgaaaaattacatgctgtgtttggaagaatgtcctggagcagcagcgttttagaaggtttttaaagacgatggtgacttgatcagagctctgtagtgctttgaggatgggttgaaggtgggcgtacttggagactggtgggcatttaattggtgccttccaaccacataaatgaatgtcccctcaaatcccttggaaacactttaattctagaaaattcaaaaattgtccccaacatctttttcctctgagttggtaccctggatctttgggtcttcttttctttccttttttgatgttttattttgggtaatgaaagtcacacaggttttgaagccagcagatttggcttcaaatccaagtctcagttgcttgctagctgtaagggacaaattatatatcttttctaaatactcatctataaaatgggagtaataattgctatggcataggatttttttaaaaaaaagattagaaatcatgtgtgtacagaatttagcacagtaactgatggatattatttctattacctgttatcttggtcttctagttgatagctccttgctagcgtctagctcctttccatagctcttcctgagtagggccagcatgcagtgccacagcttgctaaggcttctcctggmttgctgagttgttctagtttttgtggcacctcacatgctaacccaccctgaacacatgctctgaaaacataacatttagaggaaggttgaagactgagagacaaggtatatctttgaggaaattcagatgcttgtcttgaggagctcaggaaagctagacacgagtaatgactgtcgtttgtgtgtggcattaataaattttacaatagctatgtccccatttagttattctatgtcacaaataaaggcaggacagtagtatttactgtgttaaggtactggtttcccaggtatcttacagtgagaagacagaagctcagaaagtgtaagcaatgtgcatatttggtggagtctggatgtaaacagagatcttgatgccaagcctgtggagctttgtctccatataatgttgtctctttcataataactgactgtcatgtggcagattattcatgctattctgacattgatggcattaatatcatcttattttcccaatctattcaaggatcagttttgccttattttattttgtttcattccaaattggagatgtagagaaaaatcacatgaagtttgatttgccagtctcctaaaaggaagaaaaatgtagatttttaatatacttaattttttttctttaataggtatgtgagaaagagagcagtcccaaattggtggaactcttactgaatagtggatctcgtgaacaagatgtacgaaaagcgttgacgataagcattgggaaaggtgacagccagatcatcagcttgctcttaaggaggctggccctggatgtggccaacaatagcatttgccttggaggattttgtataggaaaagttgaaccttcttggcttggtcctttatttccagataagacttctaatttaaggaaacaaacaagtaagtaacaaggagaatattttttacaattcttatttttaatagtatttttttaagtcactagtcttttagtggttattcatgccagtttgagggaccttaagccaaagatattgcaaaggtttggattttttttttttttggctatgaaatacttcaaaatgayatttaagttctttatgagatagcaaatagttatttataaaaatagagcaaaatagtggaagctttttgaaggggtactttttaatatatattttttattattaaagtaagatatccctgtttttaaaggaaatataaaattataaaaaagaaaataaaaataacttattttatctcttataagtaattaatatggatatttttcctaactttttatatgcttacatgtacctatgcattcaaatgtatgtaaaagcatacacacatatttatttggcatttttaacttagaatatactttatatttcaattgataatgcattttctttatactttcaagctcatgtgtattttgtacatattatgtgtattgatggtaagttaccatcttctgacactatttttatcttttgagctctctcatttgttcacactaaatgtgtttttagcgtgaaagctcccagctttccctgtgttaacttagtcccatgcccatctccttccccatggtcatcaaactccatgaatcaacaccttaaggaccatcttgcaagtaacatgtttgcttctctcatttttatgatgcactcactagcaaaacaccagttttggtcagtctaccagtctactttttccctcagtttcaccaagaaaactgagtgctgctagagaaaagtacccatccatgcaatttggtgcctttatacatcaaggtttccaaccgctcagtaggctccaaaagttccaatcaggctgaattttcctcggtttctcaaacacttcgtgtacccttacttccagtctttttccagtgttactctctctctacctagctctaaattctctcttcacctggctgtctcttcattcttcctgtctcagtgctatcaccagtctggaaggttctcttacatgaccctatagcactttatttctcacatatactaccattcaccacattatataatttaatttttcatttttataatctactttttggtaaattgttagtaccatgaagtcaatgtcaattttgttcatggttgtaaccttaccattgatactagtgttttgcacatagtagattatcatttagaattaagtattcaatattggcaaaaaataaaaattgtgtaatacattatgttgataagcatgtgtggaaacatgcttcatatattgatatgaatttaaattgtcctcttttgaggacaatttggcaatatctactaatatttttaatatatgtacatacttttttgacctcacaatgtactgttaggaatctatgatacagacattctcaatgtgcacaaaaattatgtacaaaaatgcacattaaaacattgtttataatagcaaaagagtaggaaaaaaacctaagtattccccaaaaggaactattcaaataaataatggtacatacatgttgtggaatgctttgcaatcattgaggaaaaaaaaacgtggagcaaatttaatgtcctgataaagattacattactccgtggcaaaaaaaagggcacagacagtgtttttactatgctaatgttgatgaaaatgcaactggaatatgatagttataaaagtttgaatatgaaataaaaccctccagaaatgggttccctggttgtctctgggtctttggaaattactgagacatggttagatcccatgtttcattacttaaactagtcttatgccaaaaacctgcttactttaatcttcaatatccgatggagaggaattgtgggcccattggagagggacrgagggagatttatcattcactatattctctttgttctgtctggagtttttaccattgacacatcttacccagttaaaaaaacatagaattgtcatttgattaattggagggtataaccatgatttcactggcagctggtctgagtaaagaacactttgggtcatagctttcaaacatttttcaggtagtatttgcctaagtgacatatttgtgtgtgagctcatcctaccgggcttcgggataatttcccatatcataacatattactctggaaaaaggaaccatttgggtatatgggtatagtgtaagccatagtatcagttgccttcttggggtttatcatatgggtccaccacatatttacagtaggaatagatgtagatacatgagcatacttcactctgctactataattattgctattcctactgttgtcaaagtcttttagctgattatctacacttcacaggggtaatatcaaatgatcccccaccatgctctgagccccagggtttattttcctttttacagtaggaggcctaaccagcattgtattagccaactcatcactggatattgtactacatgatacagcagtatcatgtagtaatatttgaagtcattacagtagtaatatttgaagaaatcttcctggctgtatgtagaacaatgaggactcagccaacttattcttcatagtagagctaatacataatgtaatgaagttgtgagaagaatgttaactttgaaattccatcaggtttcccaatagtcataatgaatcactcagcaaactttataaaaataacaagatcctttatttagcagtttatgtgttctatgcattgtgctaaacattttatatgcatcatttcaattactctttttcatcaccatatactgtatttattatcatcttcattttccaggtgaggacactgacacccagggagctcatataactcacaaatggcatttctatgacttgaacacaggcctgtctggcttcaaagcctaggccttttcctgaataaagttagttccatagagattcagttttgctgtctacrtgaaagcattgtgtacatggttatgtttttttaaaaaatatatgatctgccacctgttaattattcaggatcactagtgtaaggtgactttgaaaggaaaaatagaaatattctcyagaagcatagcaatacgtaagaactttggtcctatgtatgtttatttttgcataattgttgatttctaagttgctggtgtatctcttattttcagatatagcatctacactagcaagaatggtgatcagatatcagatgaaaagtgctgtggaagaaggaacagcctcaggcagcgatggaaatttttctgaagatgtgctgtctaaatttgatgaatggacctttattcctgactcttctatggacagtgtgtttgctcaaagtgatgacctggatagtgaaggtatttattataaaaaaaaaccctttatgctttatatttacacactgacattgaacaataggacccaagacaaaaacctgacctaaatcatctggaaaaacttgagtagaaatgtgtttattatcgcaaacagttaagtttactaattttggttaaagtgatgggtcaaggaagtgtgtctctgtgcttctaaatgttatactaattggttaatggttaatattccaggaaacaaactctgactagactggaacgagattccacgctctgtcattgactagatcctttcgtggcttgtgtaagccccttaaccttgttaaaggtagtaatgtcgactttgcagggttatacataataattagaaaaaatgtatgtaaaatgtctgcaacaatgcttggcaaacaggaagcgcttaataaaaaaggtttttatctttactatagcttaaaacaatattaatattttaatagctcacttgagataactttttaaaaaattaatatggtgaaatatataatgacaatgattagggctgatgtatttagcattagcagtttggtaaaaatggagtgaggggctttcttattaatatagtatgattgaaaacactgggtgatagaataaggatatttgagagggcaaaaaatgagagttgttccaaaatattgtgtctcaagtcaaaccatttttaaaaatcaagtgtagtgatttatatacatatataatttatataaaataaaatgcattcactttaagtatatattttcatgcgctttgaaaattaacatattcatgtggtcattgtcgctattaagttatgcaatattttcattatccaaaaaagtttcttcatgcctcttcactgaaaacatccccttcccctggcccccctgacccttagcaatcatttgcttcctgacaatgtagattaatgttttctctagttttatatacataggatcatacagtgagtactcttttgtgtctgttttccaaaatgattgtactatgttctacccccaccagcagtacatgagcattctggttgctctacatccttgtcagtacttggtattttcaagttacttttagctgttctagtggaggtttaattcatttagatgtaattttcatttccctgatgactaattatgtagaggatgttttcatgttcttattggccattcttatttttgtgtgaagtgttgaagtattttgcttttaattgggttgtcttattatataagagttctttgtatattctagatagaagttgtgacaggtatatgtattgcatatttttttcccagtcatagcttgtcttttcattttactaattctatttttaacaaaacagaggttttaaatcttggtgaaatgcagttttccagtttttttcttttatggtttgtgctttttgtatcccacttaagaaaccttttcttagcctaaatttgtgaatattttctcccatattttctcttagaagtgttaaaatctcagctttggcatttaggtctaaaacattttaagttgatttttgtgtgtggtgtgtcaatgaagagttgacatttatttctttctgtatggatatccagttgttccaacattacttgttgaaaatattatataattcctcattgaattaatggaagctttgttctctttaattgactatttaggtatggttctattttagcattatttattctgtgccactgatttataccttattcttatgccaataccacactgtcttgattactctagcttaatagcagttcttgaaatcagatagtgtaagtcctctggtgttcttttaaaaaaaattgttcttattattctaggttctttgcatttccatataaatttttaatcaactaactttatgctgggatttttattgtaattaagtccatatttagattttatatagaatttatttataaattaaatcatattacctatgattttaatgtaatctataatatataattaatacataaataataatttatatagattatatctataaattaatttgagggaactaatatattaataatgagtcttttgacatattaatgtgatatatagttcaattagtcttttaaaatttctaacagtgtgttgtattggatgttttctgatactattatagatggtattgtatttgaattctaatttccagtagttcactgttgatatatagaaacataattcatttatttgtacatgaattttgtatcctgtaaacttactaagctcacttacgtgttccagtaccttattatagattctacaggattttctttgttcacaattataccatttggtaataaagacagatttgctttttcttttctaatatttatgtcttctttttttttcttgtcctattgcactggctaggacctccagtactatgttgaatagaattggtcagactgggcatcattccctggtttccaaacttagaggaaaaacatacagtctctaatcactaattatgacattatctgtagtttttcatagatgcccttcatcaaattgaagaagcttcttcctagtcatttttggagagcctttttttatcattaataggtgttgaaaaatgctcttcagcatctgctgaggtattcatatttttcacctttattttgttaatatggtcaaatacactgactgattttctaatgttaaaccaacttgcattcctggagtaaatctcacttggttatggtacattatcctttttatatagtattaaattttgttttctaaattttgttaagaattttgcatctgtgagagatattagtctgtagttttatacttccttgtaattatgggagtaatgctggcctcttgaaatgaattgggaagtgtttcccattccacaattttctggaagaatttgtgtaaaggtattttcttcttaaatgtctgatagacttcaccagcaaaggccatctaggttttaaatttttgtgaggaggagatttagaattatgaatttaataactttgatagatgtatgattattttaattttcttttacttcttaagtcagttttagtaatgtgtaactttcaaggaatatgcccatttcatataagttgccaaatttatttgtttaatgttacttatagcaattatttaattatcctgttagtgatttaattatcctgttaatctcttcaaagaatcagatttttgttatattgattttctctattgtttgtgttactttctcacggacttttgttcttatctttattgttcccttttccttacttatttttattttaattgactctttttatagattcttaatttggaagcttagaacactggtttttagaaccttcttattttgtaacagaaacatttatttaaggctgtatatgtccttataaatatcactttcactgcatcccaatattttgatgtgtcctctttctattcatttaaaaaaatttaatttcccaaatgtccaacaatgatagactggattaagaaaatgtggcacatgtacaccatggaatactatgcagccataaaaaatgatgagttcatgtcctttgtagggacatggatgaagctggaaaccatcgttctcagcaaactattgcaaggacaaaaaaccaaacaccgcatgttctcactcataggtgggaattgaacaatgagaacacttggacacaggaaggggaacatcacacaccagggcctgttgtggggtggggggaagggggagggatagcattaggagatacacctaatgtaaatgaggagttaatgggtgcagcacaccaacatggcacatgtatacatatgtaacaaacctgcatgttgtgcatgtgtaccctagaacttaaagtataataaaatatatatatatatatataaatttaatttcctttgtgacttctttgattcacgagttatttagaaggctgtcatttattttccaaatatttggagattttctggataactttctggttattggtttcagtttgacttttttgtgctcagataacctactctgatgatttctatccttttatatttattgaaacatgctttatggattatcatatggtctgtcttggtgatgtgccatgtgcaactgaaaagaaagtatattcagctgttattgggtcaaatcaataggccaaattgtttggtaggatttctcaagttttctgtgacttcactgacttttctttctatttattgtatttgatagagaaatattgaagttgtaattgaggatttgttggttgccttttcagttttatctgtttatgctttgtatattttgaagctctgttgtttgttgtgcaaacattaaggactatataacaaaggactatatataaaaataattttttaaataaagtaaccactttatattaatctaagtttgcagttagtatcattttcttcctctggaagaattcccttttacatttctagcgcagatcttccagaaacccatatgcagattactggagcactttttccataactgccccagaactcccagctatctcagtctccataaatgttgatctctatctcctcatctcaggaaagccatgagactgtttaaatttcttcttatgtatatggcccttaatttgtctctaagcagaaggccagagtgatcatagggctcacataatttktttcccttctttcgggtattacatagtcctatgctgtctgttgcccagtgtctgtatccagtcatttaatatatttatccagttttcttgttgtttatgtgagtaggttaagttcacatttgttactctatcatgcctgaaagaactctcttcaagtatttttcaagaaaacattagaaattttaacataaaataattataaaatgcactatgctgcttgtacaaataatgtgctaatagacatttcacacacatataaagtgggataattatgataatttaataatctttataattatgtaattgttactaaattataaattatattttattaaaattcttaagcattaaaataatttaaactatagaattaattaaactttagcaatgaaccaggcaggaactgtttatatcaggatttatactgaatattataagggtggtatttggatatacagattttataatttggttttgacataaaatgaattctttctttttctaagataaagagtaggggaatttaaaatcataattaatttttcacaaatgcattcacattatttatctttaatatgatttttttattgatctttgttttcttgtaaatttattattttgaaagtactgccttttccttattttataaaacaattattgccagccaaatttattgtgtttattttaataccrttccataaaagaaaccatgaaacatgaaattcaaatagaaatttattaaaaattgctgactgttaaataatttgtgtgattacaacatttaaagcaagatttgaaaaatttatragaaaaattcagggagttaatccactctctttcctatgctgctagaccctattccagcggtctccataaaaaaaattcagagaaacagaaagcagtaacagtgatcagattgcatacaaactttctgcacacacatatatttgttataacttatgtaaccgttgattgatttggctttttcctgctggactatgagctcctctgaggaatagatttattttttttctgcatatcagtatcccgtgcttacccagtgtctagtctgtaacagccattctataaatatttatgggtgaagaaaaatgttgttgaatttttaaagtgaaaaaccaacatggcttatcatctctattttaaagattttacaaagggaatggactrtgaaatttccattaataaaaataggtctaatcttccatgattgaactatgatagaaggatcttatgattgagtaagctttttgtattcaccttcatgttattttatcattttcaaaataggaagtgaaggctcatttcttgtgaaaaagaaatctaattcaattagtgtaggagaattttaccgagatgccgtattacagcgttgctcaccaaatttgcaaagacattccaattccttggtaagttaaattgtgcaattgtgattatgttgtgttttgctgctgacattctcttgataactaaaatttatgccaaagctaggaacaattggtagggatttccctgatgtatgaaaactataattttgagatttttatatatgtaatagatatgaaaacatattagatgtaaattatgctcaattcacrtttgtagtcttttgagtatgcagggtatgaattttttggggcayatatatatatatatatatacttacagtacacttcaagatggttttcttctttcttttcagaactccatgtctgaaaagagcccaggctagacctctacctaatggtgtgggttggtcccatgaacactttagctagaaatctgatagtgatttctaagaaaccagacagaagtctgaaggacactgaacaagatggagtagcataatataattcattgttcatctatctatctatcatctatctatctatctatctatctatctatctatcatcwatctatcwatchtctatctattttggtgtattgaaagtcatttaattttttagatacctttattattatttcaacctcttgtctgttttggaactrtggaaggactatggcatatttgcatgaggagtctgataattctagttgaggaaattgggagccaccttattctcaggttcactttgaaagacctgttctaacctattctccaattttgattatagctgagtactaaaaatatgagggttgttttgtgttaattctagatcttaagatgggtgaaatgaatgactgtagttgaatcggttaaattagctgtcagtctttatatgctctttcgaatttatatataaatttagttataaaaagtagtttggttaatgagaaattatatggatatagctttttcactcaacctttctgtttttcagtttccttatatttaaaacaaaggagaaagagtagatgctttctaaggtcatttgagcactgaactggagttttcttttatcctyataattgggttcttagtttttacttgcctattttttcccataattataaataccattaaccctattaaaatttcatggttccttccttataaaaatgtcctcttctccaataaatgacagcaattttattataaattattttttaataggggcccatttttgatcatgaagatttactgaagcgaaaaagaaaaatattatcttcagatgattcactcagtaagtatttggatgtaatcataagtaaatagatattttgggcagaatgcagtgtttggttgaatttcctccaattattcaaatattcttggtgccagtttcatcttacataatcttcatatatatttacctaatgattccttccataagctatagaaaaatgaaacatacatttaaaaatttacctttcttgaatattatagaacacattagtctttttttttacaagttttctgaaatgtaaataacacctccaccaaggccactcttcatcctctcctccagttttctttctttcttttttttttcacaccacttacaccacctgattaaatgctttttatttactgttcatctctgccactggaatgtaaactccatagtttggttttctactgaatcttcagtgccttgaagaaagcctgattgctaggaggtgctcactaaacttttactacatgaatttaaattatttgcttatatttccattgtttgtttgtttttgacaaaagggtcatcaaaacttcaatcccatatgaggcattcagacagcatttcttctctggcttctgagagagaatatattacatcactagacctttcagcaaatgaactaagagatattgatgccctaagccagaaatgctgtataagtgttcatttggagcatcttgaaaagctggagcttcaccagaatgcactcacgagctttccacaacagctatgtgaagtaaatttaatttatccttgtaactttcaagacatttgaagagcttttgtatttatatctaatttgcataattaagtcgtttaaaagaacattctacttttgtgtcactgggtgataagtcccccgtgcctctggtttttgcacacatatcttagtctgtgtgatgttcaggagcatctttgagggcaggcaatggaaacagatctgattagaaaggaattccaggttctgtacggagtacatgttaaagtctgtcaagtgtatattgattatactttaatcatttaattcaagtaagacaacttcaacaatttaaattagattaggtaaactagaattagacctggtttggtagtactggctctgactcagctaccaactgtgtgacaatatgaacatgtcactccgcctgctctaatccttcattttctcatctgtgaaatagagattcaactaaatgattactgaaagtttttttttcagtttaaaataatgtgtaacttaaagatttttttctttttggtcaaagttcctgtcttgtaagaattaaagtataacatagtttgttgataggatagctctctgaaaattgactttgctcaccatttgtatgtactacagatcaaaatagttttgaaagccaaagaagatatcataaaagttaaaattattttaatgcaaatgtttaaattgttaaattctcaaggctgggcatggtgactcatgcctataatcccagcactttgggaggctgaggcgggtggatctttttgagttcaggagttcaagaccagcttaagcatcagcaaaatcctgtctctaccaaaaatatgaaaaattagccaggtgtggtggggtgcacctgtggtcccagctacttgggatgctgaggtgggaggattgcctgatcctgggaggcagaggttgcagtgagccaagatcgcaccactgtactctagcctgggcaacagagtgagaccctgtctcaaaaaaaaaaaagtcttgttgcaaatgcatttccccctttttaagcctaaaaaattaatcataattttgagatgttttaaaggcaacattacataaattttaagtatatttaagggatgttttttctctaaagtttttatatctggagacagagagaagaaagaaaggtgacccactcctccagccatgccctaatgtctaaaatgtgtctttctctcttctccacttctttgccttgctaaatacttcaagccacccagggctcaatttaactgtcacttcatcactctctgcttctcttcctttttccttctaccctccagccaacctacccacctagcctccatgtccataacacctgatgctttccacctaattctcattcggtcatccaatttgatttaaaatacctttgcccccactagactgtgaactctttgaggacaggacttgtttcaggcttgtttctgtctattcccagtgcctagtgagatctgacatatggtagaagtttagtacttactgaattgatttgtggaggaataaatgtctgaaacttggtaatccttcaattaatatttgttaaatgagcaagcaaaataattttgggatttagtctagttaaaacaaagagaattggaagagactgtgacaaggtgagacatgccggcattcaatgactggacaagctcagaaccttctcttagggaaatttcaaaatgacaccattagatggcactttgtttgtttgtttgttattgtcaaagggtctcatctatgttccttttataggaacatttcctgattaaaccttgggaataattttaaaatctttacttcagaataagttaatgagggtctgaaacaaaagcaggaattttgaaacaacttctggggctaagagtggttaataagcctctataatgatatcaaactctagagtttctcgtgtggataaatatattgataaataaagaagaccatagagaagtgattgattttggtattttagctctttgagagtattacgtacctaagttttaaaaaattgacataatgtgtaagtaggggtttgctattatcattataaaattagaaattgcttaaaaatagaaagtagaaatttgaaacaaaaagtttcgtaaaaaacaggaggttctaaaatgaaacacattataagtaactatttttatagttaaatcttaaatatatcaaaatatgtaaaatttctgacagcatttaaaacatattcccaggattatattgtactttttgttaaatcattaattcaaatatttgttgaggcgtattctgcttccattttgctctttctggaaataatttacaaaaaagctgaaggaagctttcaactctatttttgtgaacctgctttttacaatctacctgttgtaattttcctggttttacccatgctacaagcagagacgattgggccaattagtatactgaaattctgttgtggattgtgttttcaactttttgaaaattcttgatggttctagttaccagaggtgtgtaaggcagaaatattagctagacttaagttcctcagatggttcactttagaattttaaactattgtcttttcagactctgaagagtttgacacatttggacttgcacagtaataaatttacatcatttccttcttatttgttgaaaatgagttgtattgctaatcttgatgtctctcgaaatgacattggaccctcagtggttttagatcctacagtgaaatgtccaactctgaaacagtttaacctgtcatataaccagctgtcttttgtacctgagaacctcactgatgtggtagagaaactggagcagctcattttagaagggtaagaaagagctcattaaaaataaaagggttgcctaaatatgctgatgttaacaaaatatgctgacatttttatagcaatgagttttaacaacatggtgaaactccatctctactaaaaatacaaaaattagcccagcgtggtggtgcgcaccttataatcccagctactcagaggctgaggcatgagaatcgcttgaacccaggaggcggaggtcgcagtgagccgagatcgtgccattgcactccagcctgggtgacagaggcgagactctgtctcaaagaaatatatatatatatatatataatatatgtattataatatataatacatatattatatatatttattatatataatacctatatattatatatatactatatataatacttattatatatatactatatataatacttattatatatataataaaagaccgaggcaatgaatattacaacttttatcaactgacttacatttttacaactaatttttaaattaatgagtcctctttgatgctgttctttgaaagcaaattgtttttgatattttttctttaaagcatatgaatttatgcaatttaatcattatcttgtctcttgtgactagaaataaaatatcagggatatgctcccccttgagactgaaggaactgaagattttaaaccttagtaagaaccacatttcatccctatcagagaactttcttgaggcttgtcctaaagtggagagtttcagtgccagaatgaattttcttggtaagtgttctgtgtgggtctcctccttaccaggccctctaagttgtacaagatgagtcatatatggaccctttagttgtggatttaaaagtggcatttcagtttaaatattatgctggatttaaaaaataaaattagcaggttggcaataaaacaaaatgctataaaactatgaaaagacatgaaagaaacataaatgcatattggtaagtgaaagaagccaatctgaaaaggctacatactattcgttcccaactataagacattctggaagagacaaaattatgaggacattaaaaagatcaatggttgtcaggggttaggggagggagagatgaatagataaaggacagaggatttttagggcagtgaaactgttttgtatactatagagggggatatgtgccatggtacacttgtcaaaacccatagaatgtgcagtataaagaatgaaccctgatgtaaactatggactttgagtgataatggtgtgtcaaatattggctcattgattggaacaactgtgccaaactaatgcaaattgttaataataggggaaaatgtgtgtggggtggtggtggtggtgagggaagaagggatttattgaaagtctctggactgtgtgctcaattttcctgtgtatctaaagctgccctaaaaatagtctataatttaaaaaaattatcacatttttattgtcagaggttaaaatgatagttacttggcctactgtgtagtaccctgtggttccctttagtcttaaactaaacatgcacatggctgcctgagctgggtaaggcatcctgatactgagatattgtttttcatactgaagtttcttcagcaactttttgtatgataaatatgattactctttgctgttgttagaaataaaattaatcatttaatggttttcaaattagtgaagttaatgtatattcattcagctcttgtgctttgcaagacattataataatgcaaattattatcatcacttttattaaaagttgtagaatcccctgccttctcttagcatatgaaataatagaggaaattatgttcatttgtatcctaaatgaacattttaattttaaggaacaaaatacttttatgacaataaacaggaattccccatattttatcttccttcatagagaatactcacatcttgccacccatgtgtttattctatacctgactcagtaaaataatttttaattctatttaatagcagaatatggcttaactacttattaatagtattttaatttgtcagagctttcagaaactaataatgatcaaagccatcttaatttggatagtattttcctccttttccgcgccctcccttcctcctaccctcctgaatattggccactttccaaccatgatcttgaaactggggatagagttgttgactcactcactagtaagcaaagcaaactcggtctctgtccttaaggaacttgtgattaagttcagagcacagacaaacattaagtaatgatggcataaataaatgtaattttatattgtggtgccttctgtggaaaagtttcaggatgctctgtggtacctcaggggaatctgattcagactgtggagtcaggaaagcatttctgtgcctgtgacatttaagttgggtctggaaagaggagcatccaaaaggaccttgaagcttgtgtatggt

SEQ ID NO: 6926 - DNA, 14165 bp, Homo sapiens
agactggtaagatctaaatacacacagagcagaatgggaaggaaactgcagacaggagacaagcgaaagatttgtaaagtgggaaggaagcagcagtgaacaaagacaaaaagaactaagcaaccaaagacaactttgaagtgaaggagatgcatttctttagagccaaactagaaatcatgatgatgggaaaggaaaagaaataacacgaaaaaatactcgcgatcacaaactgtggggatacttgagttcctgtaattggtaatgccaccactgacaccattttagtcaatcatatgctatcattaatcacatttaagtacagcatccagtaaacactaacagtgtaactggagcaacacttttcacaaacggtcaacaggactaaatgctttgtattctcccgcggctaggctatttggctgcagtattccccaataatgagacatgtttcatctgcagttaaggaaacccatggagcagtaagacattatttcctcttacctgcttctagatagcagcctacatctcagcaaaattcctgaatttagctaactttaagggataaatgtaaatctgtctagaataaaactgagaaaggggtagcagaccccacttgtttgccaacagcctcttcaaacatgtgccctgtctctgagaaattatatggtaaagcatttataactgtggctgtctatggaatccacacttggcagaagagcctaaaactcatcctatataggaaagaggtcaaactcagaaataaacaagtcttcaactgaaatggcataggttaaaaataaaattacaaattcaagtctctgggctttagatagtgtaaaacaccaggcccctccaattttggtagagcgaaaaaaaaaaaaagagaaacaaaactaggtctcccaattctagattaagaggaattccagtacatgaaaaaaaaaactgaaagtgtcagaaagaatatttatttgcttttaatggatgattatgagttagaaaatataaccatacttgggtctgcaatgagtcaatttggagtatatttctgcttctgtctttacaactaaataggaagtcactcctaattttatttgcccttctgtaacattgggaaattctgtttatttccttgaatttataagagttgcacattacagaaaaataaatgctatctatcccaagatatatacaacaaatttaactgaaggtaaaattctgattactaaagattttcttttaagcccaggtctgtgggaaaagaggaacttagccttttcagggagactttaaggtcatgaaaagccccatatactcctctatgaagctgttctcccattttcaaacttgagaaaaatgttaagaaaatggatacatgatagtatacacacctgatttgacccaaacctcaggaaagttccttaacctcactaatcctgtttcctcatctataaaataatgacaggccgggcacagtggctcacgcctgtaatcccagcactatgggaggcagaggcaggtggatcacctggtcaggagttcgagaccagtctggctaacatggtgaaacaccgtttctactaaaaatacaaaaaattagcccagcctggtggcgtgcgcctgtaatcccagctactcaggaggctgaggcaggagaattgcctgaacccagaggcagaggttgcagtgagccaagatcgcaccactgaactccagtttaggcaacaagagcaaagctcagtctcaaaataataatgacaaatccaaatctcctgaatagtatctgtaaagcatcaacacaacatcaacacaaagatcggcacaaggtatgcactcagctctgacaattctttttactcaccaatctttcttctttctctctttttttcctcttacatttcaggtatcattttgctttctgtctttgggcaatccactcgcaggaagttactaaccaaccttattggtaatacctattattcattccctggtccaatctctccccttagctctaggataaatatggccaactgaccaccaatccattccaatctttaaataccctgagaattgattatataatcttccctccaaatctgctcttcctctatttacctatcttggttgtcatccacagtcacacaaaaacaacttggaagccaactgagctcttccttcaccctctgcatggccctccatcaaatttattgtgaagtccttagaaattctgtttcttccttcacttccatccccactgcctgtttgttcctcatcatggtgcatgaactcctgtcagaaccttgtaactgacttccctacatcctttaaacatgtgatatcttcctaaagttcaactactaatcttcccttccaaggtaccaacactggcttcatgatagtatctaaactccttggcaaggaattcaaagcttttcaggatctgctcctgcctaccagctgctcccaacttggaattctgatattctaggagtgtcaaacaaactttaataactagccaccctctactcaggctgttatttctgcctgagacggcttaccctctatccccttgacctgggaaattctcttaagaattacttattttacaaaacccttccatacctttattagaacacctaccacataagatttcacttcttgtttactgcattatctcctctactcaatagtaaaccgctgtagagcagaaactaagtcttgtattacaaccaggtgctggctgtacatagtacacagaaacgggtagaatttgctaactactcaaagagtggggcagccaagattaatataaacagtatatttaagggcatggaatgggaaatggtgtctacaataaagacgtgaattttaaaaactaatgttttgaaaggagtcattgtttgcactattgatcatagaaatatttttaatgtttttaaaaaggagtctttttttaacatttggtctatagacttttgcaggaaaaaaaacctgaggttttaaaagctataggaaaaaatgtttcttgcttatttcaagcaggagcagggggaaggaaattagactagtgtggggagaaatgagaaatgagagctacttcaactcagcacagttaacatttaccaaattaaaataacagtaagccaaaccaaacttataataggtggaaaacaactaaatacaaagctagaaataaattcttttagttcaactgtaactttcatacttgaatatgtaacagcggtgtacctgtgacattagtatttctgaggcaaagagaaaacctccctaccttgaaaacaaactccctttttggactagatgacatttccagattatttccataatacagaaaaatcctagttgcagattcaataaaaaactggagaaacaaaagacaacaaaaaagtctcaatttataacaccccaaaatcaaaacttaagtgtgggaaatacaagacaatcttgtggacaagagaaatcaggaagaaagaaaaatgacattttccaggtttccgcaggactttctgatgtaaaatggttgaatcagaattgaaaagacaaccaagagtcaagggcagtgtcttcccagaactgctttcttaaggtaagggaggggaccaaagacactcattctttccactaaaaatttacttaatgtttccccagaaacgataactgacacaggcctcagttttatcttctgtaaaatgtctacttcccagtgttgtgaggacaacacagctaatatttatcaatcatgtcactggcttaattacaacttatttaaaataggtattactaccattttacagatgaaaaaaactggatcacaaagtgactataagatgatgacagctttgaaacccaagcattactaacccagaaacctctgaacagcaaaacttcgtgcctcaatacatgtgttccttttctgctcaaccaattatattcctaccatctcttaagaaaaaacgaaaatgacatacttttaaagcaacctactatgtgcctggcatggtaaattgattaatttatcctcataagagccctgtatagttggtttagatttaaaagtttatgctttccccagtgaaaaacttttattttacatgtaaaatggttcttaaattgcttctctgacataaatatgtctgagtttgagccctatgagtcaggatttcccaggacttgataaccactctgggggaaaaaaaaaaaaattgaccattcaggttccagatatacagaattaagaatactgtgcaaggacagacagacttggggcctgctgtccaccagtgatctagaatattctaccaattgaacttcgtatctccaacctcccacaaaagcaatacaaagagaaggcagtagagaccttgtctgtgggtctttcccaccctgaattcattcacattgataatccaaatctctgttttacatcatctaattagtaaaacaaaaaccattaagctctgtatgtagtatatgaaatctgctaggaaatggaaattctagccataacttagctatgaaatactaattaagaaaaacaactcaaacaatctcagcgtatttgcaaagcacctcatatgcattttaaatacaggacccagagaaatagctgcgaaaggaaagccaaagttattaaatccaaagtttttcattttcttgacatgctctttctatttaatacagaaatgtactaatataggttgccttttggtattgtaatttggtcaaccaaaacttgggaaaaataggtccaaagtttttcattttcctgacatgctctttctatttactacagaaatgtactaatataggttgccttttggtattgtaatttggtcaaccaaaacttgggaaaaataggtttattaataacaaaataatgaaaaaaaatggatttcaactagtatcgatttttaggtgtgtgggggcaggggcattcaagggtattatttcctagtaatgatcacttagattctaggccttacacatgattcaaatgcaggagaaatcaggaaagaagcaacagatatggtggtgggtatcggatgtctagactacaggcaaaccccaaataccaaagaagcatccatgtgtcaaaccagcataatttttgagctatgcctggggccacatacaaaaaaagaaaaggttagcttgaaaagaaaaatctaggagaggtaaccagaaggtcaaccacagttcacgggatctgggaagaagctagccgttaccctgtgtcatcttcctgagcagcttcctccccagccagctccccagcctccttacaatgtttccaaaaggcccaactccctaaacatttgcttcttcaaggtcatcctaaggcactgaataaccaccaaacactgagtcacgcatacctttcgcctaaaaaagatcccccttcccaaaatcattatataaatactttaaatgccatgagggttttctccgaaactccaccagaaacaaactcccagacttttagattgggcaactaaatgtgttcaattttgcgacataaaattttaaaaggcttttcaagtctggcaaattccagttcaaaaacaggtgctttcagcgtactctgaataacaaggtcaaattcatttttaaattattaaaagaaaaagaaaagcttttcttaaccctccttaggacaacttaagaagggggagaaagaattgctggggtaaaactgtctcggatagggtccctgtttaactcaagagtaaatcctaatcttccgagtgcctgaagtaatggaaggttacaggaagaaaataaaaacaaagaaactgactagggtcatagttaccagaacaaactgcaccgccctaccacctcaagaaaccaactccccctacaccaaaacaaaccttgcccttccccgctccccccaccccctagaaacacacaaagaaactggccgcacgcacaattcgcccacagtcctcacttcccttagtagggcaacagggagccccggaacttccccacggtggtttatcgggcgtcgtcggggctgggtcccctggacttgcgggccacagctcggctggggaggaggtgctcgccgccctcacccgtttctctgaaagcagtaaaatgcctccccgctcctcccagggccctcgggtccccaccttccgtaaatcgtgcttccccctcgggcactccggtgactgccgagagagacgccgagccagcaagtaagaatgctccctggtggatttgttggtaaataagacatctcgcgtcgggaggaaagttcctgcgggggccgctcgccggggcgagggcgagggcagcgggaggtgaaccgcgtcgctcgccgccacctccctcacctgcgccggaacaacgggccccgcgccagcccggcccggcgcctcccgcaggccgcgcctcccgcacgccgcgctgccggggcttgttcctcctcatggctttgccctgacgtaattcaaacatggcaacagttcgacttcaaaggcgaacccacagacctcccagacacaggctcccgggccacgagaaaccggccgagcagtccgggccaagctccccggaaccctcggccgtcgcaacccccgacgccagggctgaagcgccgggcactgccgcctccctcggtcgcccgcccgcacgcccggagcggggaagcacgccgcctccctacgcaccagcatggcacctcgcacaagtagcgccgccaaagtttccccacgagggggctgagggacaaaagcccctcccgaaactcgcccgaacttcgagggcctccgacctgcacggccctacgcccaggcggcggccccgagcgccgggggcccgcacgggcacatgcagccctttgttttctgtccagccgggcgctgcctacgtgcagcatcagggatgtcggagcgtttcgcaggggccggacactggacgatcaccctgggtaggggtccggaccccgcgccccgaagagtccggagcctggccccccgaccctcccctcgggagcaggcccatttaatcaaagttttgcagtgtccttgatgagaaacgcccggagtatccgccccgcacgggcggagagttggcgactttcactctgctttttaaactggcaagacgccatcatcagcaaaccacattgtcctgccggccggacctgcccgacggcggccgcatcccacggctcacgcggggctggacattcggacaaggaccagggtcgcagcccgaagcacgtggtctgtcacgtagagcacaaaaagcagtgccctgcrgagttcactgactcccgcggcgtasacaacgccgccgcctccatctccagccaagttggcttccctggccatcttacagcgcggacggccgcccataaacgggaagccctcgcggtgtcgcccacacctacgctacaggtgaacgcaccgggagcaaaacttcgggctccgaaagcaccccggacaccagaggctcttgggcgcggtccgaagagggcaggcgagtggaagacgggctgtttttaagcgaccgcgtgttgctctcattgtcgcatccgcatccctccggagttgagcaaacaacgccacgccgcgtgcgctccggcagagcccagcactgacccccaaaggccgatttaaagaccctcggccgccagctcggaagcggatggcaacttagtttccgagcgaatggcgtttattgtccaccctagtccgagggctgcagtcaactaaaccacgaggtttcacaacggcgcccgaccctgcccgcgcctcgcgcccacgcggacgcaccgaccccggccgctgcgcggtggccaacgagtcgctttcctctcgggcctttcggccgccgggctcctttccgcgagagaacactgcggcggagaaaagtcattgtcaccttcaacgtggatccctcaactccggcgactcctcaattatgcccaggctccactcacttccccgccccgagactttcggtttgcctcaaataccctccccaattaataaatacacactaaacacgagcgtaccaaagaacctggggtctgaagatcacgaaaacagcgctcccaacaatgccacctccaagacaaaacttcctgtgtgtatgtggaaggacggggggaggtgggtggaggtgaaaagagaaaaaaaaaaacactgaaatcaaagcctcgtgagacagttttgcactagaagcatggtgagagtcactcaccttccaaaagcagccgttccacgcgcaataatgtccccgaggtgcggagtgcacgccaggccagtccccctcaagcgctccctcctcctcaactgccttgtctagaaagatagtctcctgcagttctgcagttgctaccgctggccgggaaggtgtagattccgctttccctctgcgcacgcgcggctcccggcacaaaattctcttgaatcgaacttatttgcatacgggcgcgcgcacgttgcgggctgggagggggagaagtcccggcgaccgcgcgcgctcccgaggcctctattgtccttttaaggggagaagctccgcggcgcgggaaacgcggcggccagagggaaacgggggcggggactgcttactacggcggacgtcacataaacaaacgcccccccccccggctgcaggccgcggcggagagggagaggcgaggtgggaaagggaaaggttagcaactgaggggagggctgcgctgcttggcgtgttttccgcccccgaagttgttaggggcaccattgagcgctgaaaaattgttctgaaagctgcttttgcaaaattctcacacctgtccccactgtcggtgacagaggaggtggtcttgtaagcacccagactgaatttatactaatcccacgtttcctaaattttgtttgaagttaggtttttgaagcttgtaaaaaaaaaatcctctggggccagcaaaggtttagtttttgtgcagttgtaatgagtcgtttaataaagtcccattttaacaccctagccattcgctaactcccgcttgcccttctcaaatagtaacccaacccataacaatccagttttttcctccacttcggccttaagatttcaagtctctccgaattgaatgattgttaatttccgtgggaacagtgccgctttctttaaaagactaggcattggaaagccaataacctagggacaggcatacctcctctagcagcttgtaaagggtgttccactcacccagaaataattccagtaactggtggtcttgggaatggaaaaaataacgagtgacgtacagacttttcaatgcagaatatgtaataattcaacaatctaagcgctttctagactccggaagaaaaaaactgaagtaactcttctcagattgataagaggaaaatgaaaaccgaatgattgattcgcctttgtcccaaggacacacttaacaccaacaggcagaaacccggggttaatgatagagggtggggagagaggaaggatgtttttcccagaaacttgatattggtcccaagttacaaaagtgtgaaaatcaaccataaaacttaatcatctgctgacacgtttcgctgctttcactgcagtgtcaacaatacagatttaaatagttacttctgaaatgttaatttaattcaacaggcaattcctagtacatacagtataaacccacttctgaactcctcaactaatacttctttatttttctttaggttctgtaacatactattcctgtaactgtatatgaaaactatattataaatacctgaaaagatagcctggcgtggtggtgggcacctgtaatcccagctattcgggagcctgaggcaggagaatcgcttgaacctgggaggcggaggttgcagtgagcagagattgcgccactgcaccccagcctgggcgacagagcaagactgtctcaaaacaaaaacaaaaacaaaaacaaaaaacagaaagaaaaaggacacctctcattaaaatatgagctccttaaagacaaggattttatgcctttcttacccatctttgtattccagtgcctgacacagtgcacatcagataatatatactgacatcttgcatgcattagttggctaggaaaatttttttttaatgtaataaacggctgggcacagcgcctcacacctgtaatcctagcactttgggaggccaaggcaggcagatcacatgaggtcaggagttcgagaccagcctggccaacatggtgaaaacctgcctctgctaaaaatataaaaattagccgggcatggtggctcacccctgtaatcccagcactttgggaagccaaggcaagtggatcacctgaggtcaggagttcaagaccagcctggccaacatagtgaaaccctgtctctactaaaaatacaaaaattagtggggcatggtggcactcacctgtaatccctgcaactcgagaggctgagatgtggtggcacatgcctgtaatcctagctactcaggaggctgaggcaggagaattgcctgaacccgagaggcggaggttgcagtgagccaagatcacgccactgcactccagcctggacaatagagcaagactctgtctcaaaaaaaaaaaaaaaatatatatatatatatataataaatatataaattagctgggcattttcgcacagacctgtaattccagctacttgggaggctaaggcacaagaatcacttcaatctgggaggctgaggttgcagtgagccgaaatcgcactactgcactccagcctgggtgacggagtgaaactcttgtctcaaaaaataataataatggccaggcgaagtgcctcacgcctgtaatcacagcactttgggaggccaatgtgggtgaattacctgaggtagggagtttgagagcagcctgaccaacatggagaaaccccgtctctaccaaaaatgcaaaattagccgggcgtggtggcacatgcctataatcctagctacttgggaggctgaggcaggagaatcccttgaatccaggagacagaggttgtggtgagccgagagatcaagccattgcactccagcctgggcaacaagagctaaactctgtctcaaaataataataataataataaatatataaatataattttaaaaaattaatggacattttcaaggttcttacaggtttatcgctaatcagaactttagtttacaatttttgcatttgacctaaaatgagtttggaagttatagtggtcacattggttgatatgccagccctgtccttatgacaataaaaatgaataagcttaatagctgtttctgtgttccactggtggcaaattggaccctaatcataaatttctgccttctttctaaagagaattttaacaattgtcctgggttgtctcaaatatttatttggcttatgacagatcttccaaaaataatttcaaattattatatgcctctgaaggtatgaaaactgcaaatactggccaggcgcggtggcttatgcctgtaatcccagcactttgggaggatgaagcgggtggatcacaaggtcaggagtttgagaccagtctggacagcatggtgaaaccccgtctctactaaaaatacaaaaaattagccgggcatggtggtgcacgcctgtagtcctagctacttgggaggctgaggcaggagaatcgattgaacccaggaggcagaggttgcagtgagctgaaatcacaccactgcactccaacctgggtgacagagcgagactccatctcaaaaaaaaaagaaaagaaaagaaagaaaattgtaaataccataataatattttttaaactccaattatggtttacaggagtatatatatacatatatgtaagtgtgtacacacacacacacgtaccttgaatgctttttctcttgaaagtttatgtaaagaatatttattgtggccggacgcggtggctcctgcctgtaatcccagcattttgggaggtcgaggtgggtggatcacaaggtcaggagtttgagaccagcctggccaatatggtgaaacctcgtctctactaaaaatacaaaaaaattagccgggcatggtggcacgtgcctgtaatcccagctacttgggaggctgaggcaggagaattgcttgaatccgggaggcagaggttgcagtgagccgagatcacgccactgcactccagcctgggtaacagggcaagattccatctcaaaaaaaaaaaaaattttattgtaatacagggatggaataataaacgcaaatgtgcaagcaatgcaggaattacagtacttaggatacaccgttcaggtaaaaaagtacctagaagttgcagagctactgagttaatgtagccagacttcctctgctctcaaagtataggtcaagaagtaatctgggtaagttttttaggaagggtagctacaaaattcttttttaaaattttttattactttttaatttttctttgataatcctattgcaataaacaaaattctcaaagaaaaatcggaattccatagtctttttttttaaagcaaccacctgctatttttgaacaaccaagtgcattccgaaggttcttttgtccagtttgttgcttgaacatgtcattatggatggccctacccaggcccaatagctcatgtatgggttacttttaactactactacctaaattgcccaagtgaatttttcaacgtgaaaaaggaaagaaggaaatacaagaagtaatttataatatatcaatttgtattacaagagattgaattacatcatgctaggaaaatatctgcggattttgttttgttttgtttttgtttgttttttttgagaaggagttttgctcttgttgcccaggctagagtgcaatggcacgatcttggctcaccacaacctccacctcccgggttcaagcgattctcctgcctcagccttccgagtagctgggattacaggcatgagcctgcatgcccggctaattttgtatttttagtagagatggggtttctccatagttggttaggctggtctcaaactcccgacctcaggtaattcacccaccttggcctcccaaagtgctaggattacaggcgtgagccaccacaccctgccctgagtattttttaatgactacaatgctatgttgaactcataagtagttttcaaacattttgaagttgaaagctaactactttcttataatgtatgtctcgctgtagaattatccctaacgcttgaatttttattcctttagcaaacatttaatgatcatcactatgtgccagatagtgaaatcatttcagaacttgaggggctcaagcctctctaattcatttctatataattctattttatttgctcctttttcttccgtagaatgtgttgccttcttttgagatttattgtcagccactttagaatttaatattcttggaatggaggataaattatatataaaggattgtagaagaggacaaatcttgcttgattatgaaggacattgctagcaatttagtcatgtttgtaatgacaaactaatgattgtttttaaaataaaggcagataccctcatcagcggctggtaccaaccacatgaaaacatgtttgccaaacccaggaaagagctgatgattattattaagcatagggtttggttcctctttttctcacaacaaaacaagtacagtgttttaataatttgtttaaatctctttgaagttcaaatagcaagccgtcagagcaaggcagataagtttacactcgaaggtatagcctggattatgccatctaagttaccccaatcctccaacaagtgtcgacagctgccagaaaaagttatttattacttaatcaaaattaacttttcaaatttctggacataaaagcttaaagaattatcaaaaacttattcttagagtatcctgaacttatagaaatcttgttttataatagtatcttatgacatttgaacagcatgattttatttatttatttatatttatatatttatttatttttgagacagagttttgctcttgttgcccaggctggagtgcaatggcatgatcttggctcactgtaagctctgcctcccaggtccaagcgattctcctgcctcagcctcccgagtagctgggactacaggcgcgca

SEQ ID NO: 6927 - DNA, 13230 bp, Homo sapiens
gagtaacccatgaatggtctagaaatgcagtgatacttattctggttttgaattacgggttgaatttaaatgggtagaatgtaagttggagggatggagaaggagaaaaatgggaagaacaatctatgcagagaaaatagcataaacaaaattcaaggtaagaaatatttactttcaagattccttcagaaaaaggtacaccattccaaacccagcacctgctagaaaatatttgaattgttggaaaatgtcatgattgctgaagtgtctgtcttccccactacatgaagccaaggacaatgtcttttcatctctgtatttccagaatcagagcacagtaactggcttcagtgtacacttgataaataattattaagcaactgaattgatttggttgagtgattacaggcaggagaatagcatttgcaaaacaaactgaaaaagtcatgtgtattctttattttgccttttagacaactgtggttaaaaaaccacatataaaatttaccatcttaatcattttaagtgtacagctcagtaataagtatatttacattgttgtgaaacagatctccagaacttgttcatcttatagaactaaaaccctatacccactgaacaacagtttcccttttccccctcccttcagcccctagcaaccacgttctatttttatgaatttgaatattttagatacctcatacaagtggaatcacacagtatttgtcctttaggaccagcttatttaacttagcatgatgtccttgagactcatccatgttgtagcatgtgttaggatttccttcctttttaaggctgcatagtatctcattgtatctatataccacattttgtgtgtctaacatccatcagtggacatttgtgttgcttctacctcttggctattgtgaatagtgctgctataaacacgggtgtgcaaatctctccaggacactgctttcaattatttgggggtatatacccagaagtgggattgctggatgatatgggtattctatttttaattttttgagaacctcccatacttttttccatagcagttgcaccattttacagttccaccaacagcacacgagggtttaacttcttcacatccccaccagcacttgttatattctgaattgtgttgttgttttatagtagccgtccaaatgggtgtaaggtgatagacagctcattgtggttttaatttgcatttctctggccgggcgcggtggctcacgcctgtaatcccagcactttgggaggccgagacgggcggatcacgaggtcaggagatcgagaccatcctggctaacacggtgaaaccccgtctctactaaaaatacaaaaattagccgggcatggtggcgcgtgcctgtagtcccagctacacaggaggctgaggcaggagaatggcgtgaacccgggaggcggagcttgcagtgagtcgagatcgcgccactgcactccagcctgggcgacagagcgagactccgtctcaaaaaaaaaaaaaaaaaaatttgcatttctctgatgattagtgatgttgaacatttttcatatgcttttttggctacttgtaagtcattttcagagaaatgtctattccattttataatcaggttatttgatttttgttgttgctgagttttaggagttctttatgtttctggatattaaccccttatcagataaatgatttgcaaatatttttcccactccataggttacctttccactctgttgattgtgttatttgctgagcaaaagcttttaagcttgatattgtcttctctatttttgctttttttgcctatgcttttaatgtcatatccaaaaaatcattgccaaatccagtgtcatggtgtttcccccctacattttcttctagaatttttatattggggaattttattttgcttttaacaaagtctcagataattttaaaatgcaaaactcttgaatctaagggcactaatcaagaccaatctttggttttaaaatgtagaccgcattatcatttaacatcctaaagcttctccagcagtctagcttttctataagaggcttaagggtgggtgaagaagctgtcctatttcgaggtcctgaaattctctcacaaattttgaactccctgaggggctctggatttcgttgtcctgctaggaaactctggtaaacaggaattcctcttggcctgatgaatcttcatctccactttagaatgaatagactagagcttcacctcacttccaacatattcagcctatggattccaaaataagtaatatattactataatagcatctggaggtactgacagtcaattaaaactcttacttaaagtatctataataaaaagattatgtcccctatacactgaacatctgaatggaaaattaaagtgttggttacatgatgtcaatcatgtggagtttttctgaaagtctgtgtgtatttgtgtgtacatggctagaaaaagtaaccaattcattaactatttaactgtttatgcagctattttggcactgtgtgatacaacattgagtaattttacagttttgacaactgtctgctttatcttagtggccaatacgttgtttttctgtccacaaatacactgaatgtatctgtctcaaatacactgaattaataaaaacagaaaaaaaggagagtgaggggaagctgtaactatgttatgcccaattcttttttaaattaaatcacaaatattcttcaacttcattccctacttcaaatgtttcaactcagctcaactccctactgcacacacttcaatccccgaacaccacaacaaggcaatactcacaaatattcagggactagagggacggaatgagatatttgtttgtataagtacagcaatcctctcctatgcttcctaggttcaggacacactttttcccttgtaatccacttcaaagagattgtgctatttcgttttctggcccttgagtccataactttaactttcaactgcatttggtttagcaacatattatgccaaacaagcagaatgaatgtttaatgggatttataatgaaagaatttctttggcaattgcaagatggctgaatgattgaataggaagtaaagaataaagactaaaggtatttgaaagtccctgtctcttacctctctccctgactgaatattcagctagccaattatctaaaagacaactggtatttcatttggaaatgttggccaatattctgaatattttactttattcaatatgtagctacttggaagtcatccaaacaattaataaacacttaaaaattttactgtggatgtttgtctttatctaaaaaatcgagaaaataaaatcaattgatagtaactgctaaactcatggcactgttgtaaaacaatcaccacttttaaaaagtgattctaaatacatttaatgagtgtgaacttgtagcacttttgtatactcaatgaatttaatttcatgatctgtgttacatttgtttttatctttccttcaaaactttaattatttttcagaacaaaatttgtgataattttaaattaaaacccatagacaacaaggatcaaaatttggaaaaataagtatgtatggagagagcctagcatgaaatttcattattaattaggcactaagttaactctaagcttaccaggaaccaagtaaaaatggaaatatgaaggtttataaagctttctttatttgtttaaaaaagaaaacaaaacataattttgtttaggagatgactatttccttgtactaaatttctaaggttaatttattacatcaattcttgtatctgagacttgtgcaaagtaagagatgatctatgttttgtaaagaatgtagaaaaatgcgttgtatgatagttttacatttaacggtaaataaaaagcaatatactataatattttatcataactcagtgaagtaatctctctaagtagctatgctaattgaggctgtcagtgtgtttttcttcgtacttaatacagcaaagtccaaggtctgccaccttgaaggttacagcctttgttaaactagatttttttgtgcagaatgtcagctggggtgtaataacttttactaacttgagaatgagagaagatgggaggagtggagctcaaatttaacacaaatgccaaagtataattcatctatgttttcttcctctagtactttggaagtgttgctgaaatcatcaggaatcatcaacatagtcctttggttcttattgacagtcagaataacacaaaagattccaccagactgaagtatgcagttaaagtttcataaagggggaaaaaaaagatcaataccattgcttcagacactttcccaaagtttctccttttgagaaaaagtcccaaaacttcatattttggattatgaatcatccagtaataaaatggaagatggagtcagctattgaagtggtcatccatttctttttaagaagctcatgtggacttgttctattgcctgacctgatgaactgttaatatctggtgaggttgagttatcatgctactaatattttccaaataaatatttttatttttaaaaataagtgtaaagtatattatcaaaataagaaaataatgctcttgcataaaacaaagtggctggaaatttaaacctccacaatgatcattggtacactaatgtagctgggctctccactgccaatgcttgacaattaagtcttggttaaaattttaatttgtagaaaataaggtattaaaggtaatgtatgatatctgtaagtataggcaagaaggatgtaatggttcctttttgtgagcactctcaaccatgggatatatatatatatggatatgaactttctataagttcttgtctaggattatgctgttagttttgcttactaaagataattataccctctttgatctacatgtctatcaaatagaacctaaacttgatatgaggtttgtattagtccattatcacgctgctaataaagacatactcaagactgggtgatttacataaaaaaaaaaaaaaaaaaagaggtttaatggactcacagttccacatggttggggaggcctcacaatcatggcagaaggcaaagaagaagcaaaggcatgttttacatggtggcaggcaagagagcatgtgcaggggaactgccctttataaaaccatcagatctcatgagacttactcactatcacaacaacatgggaaaacctgcccgcgtgattcagttacctcccaccaggtccctcccatggcacgtggggattatgggagctacaattcaagatgagatttgggtgaggacacagccaaaccatatcaagtttcaaagtggaatgacagcaaagctagactaaaagccagttcctagagaaatatcccacaaaacaagagcagaaaagcagacattggtgaacaccaaggaataaaagagataccatcgtggagaatcaggtccaaggtcttagatcatcccagaaatgtatcatactttgtcatatatttctactgtgtacttcagacagcagtgaagtgataaagcagctaattaagtctaataattaaatggggaacacacttggccactgcataagatagcaatctatgaaagtatgttgaaaggccagaaggtaataatttcagggtaactcatgactcacttctaaagataattgtatatttaaatgtcataaactttcataattgccacctatgttacagattgaactgtggtcccctcaaaaagatatgttgaagtcctaatccataaggccacatatctcagaatgtgaccttatttgggaatgaggtctttacagatatagtcaaggtaagatgaggtcagtagggtgggccttaatacaatggctggtgtccttataaaattaggaaatttggatgcaggcacagagagaagactatatgaagagacacacaggaacaatactactggcgtgattccatcctgtatggctgttctcttgagcagtggtcgtttatctccgtctgctttctctcccacctaagtgtgtgccgccacctgatggaagattcgatggacatggacgtgagccccctgaggcccagaactatcttttcagttgtgaactaaaggccracaaagatgatcactttaaggtggataatgatgaaaatgagcaccagttatccttaagaacggtcagtttaggggctggtgcaaaggatgaactgcacattgttgaagcagaggcaatgaattatgaaggcagtccaattaaataacactggcacctttgaaaatgtctgtacagccaacagtttcccttggggtctttgaaataacaccaccagtgcttttatggttgaagtgtggttcagggccagtgcatattagtggacagcatttagtagctgtggaggaagatgcagagtcagaagatgaagaggaggaggatgtgaaactcttaaggatatctggaaagtgatctgtccctggaggtggtagcaagattccagagaataaaagtaaaacttgctgctgatgaadatgatgatgatgatgatgatgatgatgatgatgattttgatgatgaggaaactgaagaaaaagcaccattgaagaaatctacatactccagccaaaaatgcacaaaagtcaaatcagaatagaaaacactcaaaccyatcatcaacaccaagattaaaaggacaagaatccttcaaaaaacaggaaaaaactcgtaaaacaccaaaagggcctagttctgtagaagacattaaatcaaaaatgcaagcaagtatagaaaaaggtggttctcttcccaaagtggaagccaagttcatcaattatgtgaagaattgcttccggacaactgaccaggagactattcaagatcctggcagtggaggaagtctctttagaaaatagtttaaacaatttgttaacatttttccatcttatttcatttctctaacagtcaatatctggctgtcctttctataatgcagagtgagaactttccctactgtgtttaataaatgttgtccaggttccattgccaagaatgtgttgtccaaaatgcctgtttcattattaaagatggaacttcaccctttgcttggttttaaatatgtatggaatgttatgataggacatagtagtagcagtggtcagaacatggaaatggtggggagacaaaaatatacatgtgaactaaaacttggcattttaataaagtagcatggtttctattgaaaaaaaagattacgacatgaagatgagggactggagtgatgcatctgtaggcctgggagcaccaaagattgcctgcaaaccatcagaagctaggaagaggcaagaacagacttccctccgggttttagagggagcatggccctggtggcaccttgattttggactttgagtgtccagtacttgaagacaataaatttctggctttttaagccacccagtttattatggcggccatagaaacctaataaaatttatatgcattttttacattcaggtatataggggtttgggaaattttgtatggaaaggttttttttctccttttaggaaaaccattgaatcattttgaatgtactagaaaggatgactcacaatttaaactgggaaactggggtaattttttggtaaagcaaagcatctgtttgtagtatgtggcatcagctctctagcttcagttttcctcagtgttacacggaattattttctatttaagtaaatcctcattaattcccactgctaccacagcaaccctggctctataacaacctcttatgcctcattcttcctctcctcctccaagtgtcctactccagctaggtaatagcatagctgttaagattatactaatcctcagttggttgacatacagtactgcgtggtggatttcttggagcagaggctgggagaatttctgagagataggccattctctgctaagggctctactcctccccaaagctgggagaactacccaatccaacatgccagtcttttccctcatcttgcagaagagtccactgagggtgatcccacctgcttctctaaagcccacctctgcaagtggtattcttgatgagattagaaaagtctttaagaggctgggcatggtggcttacacctataatcacagtagtttggcaggccgaagcaggtggatcacttgaggccaggagttcaagaccaacctggtcaacacagggaaaccccatctctactaaaactagaaaaaattaactgggcatggtggcactcgcctgtaatttcagctactactcaggaggctgaggcatgagaatcacttgaacctgggaggcggaggttgtagtgagccaagatcatgccactgcactctggcctgggccacagagtgagactctgtctcaaaataaacaaataagaaatttcaaacacctgtctgtgatctcaatgtctcaatggctgacaaacaaatggttttgcataaagaaattttcaggcaagctaggtggtggaataggagacactagtcaagaagtacatgtgtagcagctgaagaaggaaaaaaaccacaccccagttcttgtcttctgttgaaaagtagattgcagctatggtagtaggaaagattttcaagtttgttcaaaaggacaatagacatgaaaaagctacgcctgtgtccagcacaagcctgattgtgtgttatcataagttagccagggcaatggtttggagaccttgcactctgggagctaaactactcttactgtagtagctgggatagtcttgcctaaaagaaagtcccagagaacagaattcagcgatgtgaggcaaaaccagcactacctgagacatgttcttaaaaaaggactgaattcctctccttcaaaatggtcttaagacaccatataactcagcctctatttctaggtaagggtaaacaatatttttccagtaatgattcaagagctaaagtaagctagtggtgcctgataaacattacctcctagtcccctaaccaaaatcttctttgcagacataaaaagtgatctgtggataactctttaaatgaacccatctataaatattttagaacacttagtaattataattgtgtattaggaaaatctcaaatattttctctacatctgtggttcttaatcttttagtagttacaaaattctttgagaatctgatgagaactgtgggtctttggcctgaggaaaaattcatttatgtatatacacagaaactcacatcaaatatcatgagattcctgggcctctgtggcctatccatggacaaaatagccaaacatccaagactaaggactcaacatttttcttaacctttgatgcatcaagatggacatattattctactaaatatgtgaatgaccctaaaagtaactcctccattagacgagaaggatattgctatggtttagcgcaagttatttggtgtaagttgcaataattctaatcccagctttaccaataacagattgtgtgaacttgggaaagttatttgttttggtttctctatttgtaaaatgaagataataatgcaacctaggccaggcgcagtggctcacacctgtaatcccagcactttgggaggccaaggcaggcgaatcatgaggtcaagagatcaagaccatcttggccaacatggtgaaaccccgtctctactacaaatacaaaaattagctgggcatggtggtacatacctgtagtcccagctactcaggaggctgaggcagaagaatcagttgaacccaggaggcgaaggttgcagtgagccaagatcgtgccactgcactccagtctgatgacagagagagactccgtcaaaaaaaaaagcaacctactttatgttattgttccatgagcatattaaaaattgtaaaagctggttcattccaagatggctgaatagtaacagctccggtctgcagctcccagtgtgatcgatgcagaagacaggtgatttctgcatttccaattgaggtacctggttcatctcactgcgactggttggagtgcagcccatggagggcgagccaaagcagggtggggcattgcctcacccaggaagtacaaggggtcaggggatttccctttcctagccaagggaagctgtgacagactgtaccaggaaaatcgggacactgccatccaaatagtgcacttttccaatggtcttagcaaatggaacaccaggagattatatccggcgcctggctcagcaggtcccacgcccacgaagccttgctcactgctagtgcagcagtctgagattgaactgcaaggcagcagcctggctgggggagaggcgtctgccattgctgaggcttgaataggtaaatgaagcagcctggaagctcgaactgggtggagcccactgcagctcaaggaggcctgcctgcctctgtagactccacccctgggggcagggcatagctgaacaaaaggcagcagaaacttctgcagacttaaatgtcctcccctgtgtagcctaactgggagacacctcccagtaggggccgactgacacctcatacagccgggtgcccatctgagacgaagcttccagaggaaggatcaggcagcaatatttgctgttctgcagcctctgctggtgatacccaggcaaagagggtctggagtggacctccagcaaactccagcagaccagcagctgaggggactgactgttcaaggaaaataacaaacagaaaggaatagcatcagcatcaacaaaaagaacatccacaccaaaaccccatctgtaggtcaccatcatcaaagagcaaaggtaggtaaaaccacaaagatggggagaaaccagagcagaaaagctgaaaattttgaaagccagagtgcctcttctcctccaaaggattgcagctcctctcctcgccagcaacggaacaaagctggacggagaatgactttgatgaactgacagaagtaggcttcagaaggtcagtaataaaaacttctccgagctaaaggaggatgttcaaacccatcacaaggaagctaaaaaccttgaaaaaagattagacgaatggctaactagaataaacagtgtagagaagaccttaaatgacctgatggagctgaaaaccatggcacgagaactacgtgatgcatgaacagccttcagcagctgattcgatcaagggaagaaagggtatcagtgattgaagatgaaattaatgaaacgaagtgtgaagagaagtttagagaaaaaagagtaaaaagaaatgaacaaagcctctaagaaatatgggactatgtgaaaagaccaaatctacgtttgattggtgtacctgaaagtgacagggagaatggaacctagctggaagacactcttcaggatactatccaggagaacttccccaacctagcaaggcaggccaacattcaaattcaggaaatacacagaatgccacaaagatactcctcaagaagagcaaccccaagacacataattgtcagattcaccaaggttgaaatgaaggaaaaaatattaagggcagccagagagaaaggtcgggttacccacaaagggatgcccatcagactaacagcagatctctcagcagaaactctacaagccagaagagagtgggggtcgatattcaacattcttaaagaaaagaattttcaacccagaatttcatatccagccaaactaagcttcataagtgaaggagaaataaaatcctttacagacaagcaaatgctgagagattttgtcaccaccagccctgccttacaagagctcctgaaggaagcactaaacatggaaaggaacaaccaataccagccactgcaaaaacatgctaaattgtaaagaccatagatgctaggaagaaactgcatcaattaacgggcaaaataaccagctaacatcataatgacaggatcaaattcacatgtaacaatattaaccttaaatgtaaatgggctaaatgccccaattaaaagacacagactggcaaattggataaagagtcaagacccatgagtgtgctgtattcaggagacccatctcacgtgcagagacacacataggctcaaaataaagggatggaggaagacctaccaagcaaatggaaagcaaaaaatgcaatcctagtctgataaaacagactttaaaccaacaaagatcaaaagagacaaaaaaggccattaaataatggtaaagggacgaattcaacaagaagagctaactatcctaaatctatatgcacccaatacgggagcacccagattcataaagcaagtccttaaagacctacaaagagatttagatacccaacaataataatgggagaatttaacaccccattgtcaatattagacagatcaacgagacagaaggttaacaatgatatccaggacttgaactcagctctgcaccaagcagacctaatagacatctacagaactctccaccccaaatcaacagaatatacattattctcatcaccacattgcacttattccaaaattgaccacatagttggaagtaaagcactcctcagcaaatgcagaagaacagaaatcacaacaaactgtctctcagaccacagtgcaatcaaattagaactcaggattaagaaactcactcaaaaccgctcaactacatggaaactgaacaacctgctcctgaatgaccactgggtaaataacaaaatgaaggcagaaataaagatgttctttgaaatgaatgagaacaaagacacaaagtaccagaatctctgtgacacatttaaagcagtgcgtagagggaaatttatagcactaaatgcccacaagagaaagcaggaaagatctaaaattgacaccctaacatcacaattaaaagagctagagaagcaagggcaaacacattcaaaagctagcagaaggcaagaaataactaagatcagagcagaactgaaggagttaaagacacaaaaaaaccttcaaagaatcaatgaatccagctgtttttttgaaaagatcaacaaaattgatagaacactagcaagactaataaagaacagagaagaatcaaacagatgcaataaaaaatgataaaggggatatcaccaccgatcccacagaaacacaaagtaccatcagagaatactataaacacctctacacaaataaactagaaaatctagaagaaatggataaattcctggaca

SEQ ID NO: 6928 - DNA, 15219 bp, Homo sapiens
cttcaaggacagatagcagctggagatatagagaacatttccagtcaaccaacaatttcactacaaattcctgatgattgcttatcacttgaagccattgtatctgtcagtgtgtttctttattactgtagtgcagacagcagtgcttgtatgatgaaggcaattttgttcagtcagcctttacaaataacggatacacagcaaggttgcatagctccagtagagctcaggtatgtattttagccagccagctagctagcaacccattgccaccacctactgtctcccatcctgactatcactgtaatttaaggaaagaaaacttcagttctgcctctggataccaagatgcccattgctcagttcagacaactgatattaaaataaagctatgctccttacttacttcttttattataaacaaattcctttgctttggctgatactagctgagtcattgatcatcattggtaccatgatattgtaatctatgctgctatttggcacaagactgaagttcacactacagtagagaatactataagataatttgcaataaatactgataataataataccagatattttaactaactttttctacctttattaatagcaatcagcacacttgaatgtgtaaatttcacagtaactttaggcagaacttaagctccaggccacatttgtataagaacaccaagtattcaaggcataaagtctgttgtaagccaaaaaaaagtcttttcatcactgtagaagcttaaggagtacatcagtggtaaatacgatctttattctcttctgtggttttctcagttgagatatttttaaaagagagttttgatctatttttattataaattatttgttatttaacataccattatgaatgccttaaaactttgtacagataaagttggacatagaatctctaaggactgactcctttaactgtttttgagtgactacattaccagataatgaatgagtccccagaaatattatgactttcaaggaaaaagggactttaggacacattacttagtgtctgtgataaataatttattgtgacagctaaatctgatggttacatatcttgttttggaaatgtacatttcacttgtaagcattaaatgcagatttgttgagtttaggttttgaggtttttttcgttcccatattcagaatttaaattatgatcatttattgtgatgtttttaaaaatcacttttaagccttaaaagtgaaattttcagtgtgaggtgctttcatgctattaatagatacagtatatcctaatatattagtcttcaaaatattaaggccgaaacagtgatttaatgatactattttttaatttttgttgttttttatccctaaaaaaagatattggaaaggttttttttctattgtcataatttataactacttaaaagcctaatcttgttttccttaagacctattcaacatgtttgtgatttaatcagcttacaagggtttaaaaacatcaggtgaaccatgtttatttattcagtaaatatttatagacaatatggcataatatgcttcccttccctgtaaaaacagtgctaaatttgaagtgtaatcttttttaaacatcattgtctatttttaattttgtttgaaatgtagtattagtttgttttattcataaggttagctgaatctctgaagtaaggatgtataaatcatgacattgatttaattagtcatctactgaagctacttttaaagagaaatatagatataaaattaaaaggaatcctgtttaaaattatatgtaattacctcataaaccttttctctccacaagcaatcaaaaaaatgaaatgttctgtaataaaagggtgtataacatactctcttttatgagaataggccttagttattttattttatttttgagacgtagtctggctctgtagcccaggctgggagggcagtggcgcgatcttggctcactgcaacctctacctcctgggttcaagagattttcctgcctcagcctcccaagtagctgggattacaggcgtacaccaccatgcccagctaatttttttgtgtttttagtagagacagggtttcaccatgtcagtcaggctggtcccaaactcctggcctcaggtgatccgcctgcctctgtctcccaaagtgctgggattacaggtgtgagccaccttgccctactggccttagttaatttttaatctcatttgacttattatgtttctcatttctagatggacaggatgagaatattttggcccaatcattttctgtttaaggacttaaacaatttcacactctaaatgaagtatatacaattttaatttactaatttagaaatatctgagtttatttttcaatataatatacaaacacagtgtttgttatacatgttcatgtacagtgaaaatgcaaaggcattttttagactctattccccttcatttgtctagacagttttaggttagccttagcttatacttttcttgactttcaaaatacagttttattgaacattcttattcttacccactgccagtctgcattgttttttacattaaaagtattatttatagtagactaatatgattttgaataaaatcacacttaagcaatatagataggttcctagaatttatgacgaggataaacctctcacataagaggaagcactagaaagtttatttttaaaacttgttgatccatattctataaggactaatgcatattttttatcttttgcttttcttgttggataaattattatgtccagtgatagtttaaaaagaacaagattttagtgtaagtcacctcacttgaaatgccagtaatgtggtattacacacattttatataatacctggaatctttgccctaaattattctgctggtttgtcgctatttttttcctctcctctttattatttcacaaatggtagaatttcttgatatgattcttgtaaagagtttagcttatcttgaacattctgtcttaagcaaatatttaacaagagaaaactttgtagtttaatcacccataagtgtaactttagcaaaattcaatgactatgaaaaataatttttttcttaactgttctaataatatttagttataatattatcaaaccttcagaaagttataaatcctaacagccagaaaaaaaaatttactatgtgtatatttatataggtgtgtgtatacacaaagattaagaattattcatgattcttttatggccaatatacttttgagcttgtataactgagataagttactctttgcttgtttttctgtagttggaaaatttaggaagttattaaaaatacatatctctataatgtaatagttttctgcctgcacaaagtttactattaatttatgtctaccagttaaaaatacgatagttagatttggcatcacgtttaaccacaatcatcaaaatctacttaaattctatagttaacagttacataagaatatatgcagagggaaaatgtcaatagttcttgtgaatgaaggaattatggatgtttttattttaattctactttgctgttttttttttcttttcagtgagcaatctgttatttttaaaatcacggtggggggaaacccataaagtttaaagagttaaagttaactgaatcgtaagcacttatataataactttttaaaagtcatttttattaccagagctcagaacattgtttggagtcctttgatctaccggttctcttaagtacgtgatttcgtgaagatagcaatggttatggcttttttgttctgttatttttattgtgtaacgtagtgtagtggttaagagcttggattttgcagtaacttggattctaatcctttaaaatggggctgatatacctgcctcatattcaatgaaatattgtgtgtacagcacttagtaattaatgaaactggtaattattagcttagttactgtaatgataatttgggaccataaacacatatcaccctacattttctttgcaactacaatttgtgaaggaaaatctcccactaactattggttatgttaatattcttcatagagttgggttcaagaagagaaatgttttataatgaagcatataactattttataaacaacattgtagttataaagaagcatgcctatagtgttattaaaaattttttgtacgactttctggagctacaagtaatgaacttgctttgagagggtccagacatactcatcctgaaccacattcctacaacatatgcccaacaacctgcaccagagtacttatatcttaaccaaaaagtttcacttcaatggtggtgcttcacaaaatcttcaaagtgctttcatgtgtattgcctcatttgagcttcaaataaccttataaatcgggcaggtagatgttagtttacagaggaggagacagctttggaatagtggtgacgtatctgaagaatagaaaaccggaatagtgctcgatgcctgaagtggtgcctggcgccagcagatgttcacttctgtcaaacaaggggaagtagtggtggagcctttattcaggcacgggtctcctcattcctaactccaagatgcagagggaaaacgaactgctcaattaagagttcttccatggacactttcttaagccttcacataaaataacaagaataatagatatttattgagtagatatttattgagttctttctattttccagcactcatctattaagtgcttttatgtattaactcatttaatccacacaacaaccttatgtgagaaataccatttttccttatttgattggtgaagaagcacacagagagggtaagcataatcaaatacaccagcataaccaaaatcacacatttagcgagtggcagggcctggatgggagtctgttcaactctctgctgtattgcctcttaaagtaggttttcttaaaacataaatctttcataactttatatatttatagtaacttaatccaaagaaccccaaaagtactagcaatgattgtttctgcaatttaaataaatccatttaattatacaactttgcattatatactgttattcagaccttggaacagtctataattgtttgtcaaaagattttatgtactactttttcttaatttcagatattatccagagtttttcttggcagatggatgtattaaaaaaatagctttccagtgttagttctcaacagtgctgtttcaaaagttgttttaaaagttctaacggttggtcttcaaaacgtaattaagaccttatcataaagagccttttgcacaggactatctcaaaccctaagaagctattcatatttaagaaaattttgttgtattaaatattagtccaagtgagctctggaaatacagtcttctgctttcttgtttcataaataacactggtatgcagacccctccccatgactcaaatattaatatatgcaattctgttacagtaaagttttcaccatggtcaacctattccagcattaggtactttttgttgttgttgttttgttttttttttttttttttgagatggagtctcactctgtcacccaggctggagtgcaagggtacaatctcagctcactgcaggctccacctaccgggttcaagtgatcctcctgcctcagcctcccaagtagctggcgctcaccactactggtgcccaccacaatgcccggctaatttttgtacttttagtagaaacagggtttctgttggccaggttggtctcgaactcctgacctcatgtgatgcgcctgccttggcctcccaaagtgctgggattacaggcgtgagccaccgtacccagcctagcattaggtactttgttttgttttgttttgtttttgttttttttgagatggagttttgctcttgttgcccaggctggagtgccatggcaacacagcctccacttcctgtgttcaagcaattctcctgcctcagcctcctgagtagctgggattacaggcgtctgccaccacgcttagctgattttttgtatttttagtggagatggggtttcgccatgcttgccaggctggtctcgaactcctgacctcaggtgatctgcctgccttggccttccaaagtgctgggattacaggcgtgagccgctgcgcccagcgcactaaatactattaaaaggaattaagcaaaatgctacgtaccaatgattatgattcatgatcacctaaacacagaatgcagacttaacttttcattcttagtgtgctaattaagtagtagtatggtgcagtaaggaattttgttaattttgttataaactccctctcctgaaatccgtaaggaaatgtgataataagaaagtgataatagtgtcatattttaaaagtagaatccactgttaagcaccaagattaccttttcttccccctgtggcacagtttatttaaatgaagtattagcaataatcatgtcactattttgtcctgaataattaagagtttgcttttttcccatgtctttgcaataggataatataaagaatagtattaaaagtcagaggctttactaatctacctatatgtattccatggctaacaaaccctggcccctttacatatgagctctggaggttcgcctggctgcctcaggcttgcagaaggctgccccaatcacagagcctgggtaaggtggaacaggaggcagccccactcggcttttctgattgcatcccacctgtttctgagtgtgttggtttggtttaattcttttcaagggttggagttggaaagtgaaaaccctagacacttgctgtggaatgtttgcctggttgtattggtgtgtccctcttcttcactggcatgtcgctttcaagtgtaccaaaggacattttgttctgttgaaagccacaggaccaaaaggaaaatattgcaactatttgcaaacatacttccctacctrtacaagcagccatatactaaaaagcactaaacaagcacaaatgaacactaaatagccttataccaaaaagcattcttgtaactgtcagggcatggtatgaattccttcctctttaagcagcaacttaccacaggcttggtggctttaagtaatatagcattaagcaaatggtcagttattttttaatgttgaaaacttccaagtgtgaataatacggacatagtttactaccttttgcttttaatatacctggttatctatttccatttgaaataaaatgaaaggagacctcaaactgatgctgagaagtagacaaaatcagctctcagacttaactctccccaattaaaatagtttttttttcccttcccatttttttgtttttaagagatagggtcttgctgtgttgcccaggctagagtgcagcagtgacatgatcatagctcactgcagcctggaactcctgggctcaggatccttctgcttcggcctcctgagtagctaagaccacaggtgtgtgccaccacacctggctaatttttttaaaattttttgtagagatggggacttgctatgttgcccagactggtctcgaactcctggcctcaagccaccaacctctcaaattgctagaattacaagcatgagccaccacacctggcctgttattccttctttatctaatgtgtgctaagcttgtgaaaaatatatgttgaggtaaatagggcaaaacattagttgataaattatgctaattaatgggaaaaatagacatgttcctctctgaacatttagaaggactctgccctacaactatcttctgtttttagaatttgtagtcactgttcttagtgccactggaaatatattcattctttgagcatgtacagggtgggctccctgttgtatttattacacttttcaaaatgccagcaagtttttgtttgtatagagttggaatgtattgttcgtgcatgcctgtgatattcatcatcaaaatatacctgtaaaaaataaactactgcttcctctccacagcttaggcctccctcttactaaaaacaatagtagtttctgtagaagtttcagtgagaaattatggttatataaataacagatatggcagaacaattttgttgtagtatttttttccgtagcatttcttaataatagctcagtttttaaaggaggggaacaataccccatgagttcaaattaattttctctactttgaggtataccttcctaattatattttacataggctgttttttttaagtttaaattctcactgttaagttgcattgagagacaattagaaatgttgtaattgtcatatctttacatgtggattatgaacaaatgaaagtttgctgtgtgattgcagttttaaattataacatttcataaatatgtcaattttagaaactcaaactctttcccatcttttgtatggataaagtttatggtttcatttctgagaatagagttggtctgctgtgctaacttcatgtttcttattccaaaggcttgattatatttttttctccagtgattaaaaatgcagcgaaaatccaatctacaagttcatatattggtatttctagacatagtctagttctaaaagaatgtacttggtgtgcatttttaagtgtttcatgtagacagattaatatatttttgtacaacattgtatttctacatttatttcaagactgtacttttcagtgactttttcaagtgcatgtgttaacagaagattgtttggaacgagagtgcagtggcttctttactagcaaagagaagtgtaatacaagtgatcatagaaggtgagaatgtgtttatactgtatatggaaacctaatgcctcttttctaaagctttgtacatttttttcgtgaaatagattaaatattttctctctaaaaccatgtttctgttttaatgtgctttctaagtatatcatgaggtaactctactacttagaaacctgtaagctgtgatttacttgagcttttggggaaatggaaagcagaatacttagtttaaaaaaaatttttttttaactgcaagcagatacctcaagatcaaatcatgcaatcataattagagatttttaatatatatattgggaaagggtaatctattcaataaacgatactgggaacatttgaaaagaacaacaacagaaattagatctctatctaacactgcacactgaatttgaaaggaattaatgacataacataaaaaataaaattacagaaacgccagaagaagataaaggagatgtcctatagtgttgagggtgaggatggcattcctgagagtgacctgaagcccaaaagcatgattggaaaagttgacatgtgtgaccccataaaaattttaaccgtctgtatactgaaagaacagaaatgaaaagaggaaatgcaaactgtgaaaatattttcaagacacaaaatggacatgggattactatgtgtagtatctgaagagctcttataaactaatcagaggaagacatcccaatgggaaaattgccaaagaatatgagcatgcaattcacaaaagagataaaataatgaaacatgttcagtctcaccaaacgaagaaatgcaaatgcattcattcagctatctattgagcacgtgttttatgccatattccaggcccacagatgaacaaattagacaagatctctgctctagaacttgtgttgtagttgggaggagagacaagaaaatgaataaaacaaaaaggataaatgccataacaaggtaaataggggagtccaggcctcacaaatgaatttgaatgatgagagaagcccaagtcatgcacacctgtgggaagtgcagaggcgacgtaggcatctgttttccaaagggattccaccagttacactcacactggcaaagtacgtgacagccagtgaatccatgtattcaccattatattgtcaagacttgaatttttgccctttagttttaagatggtatgtcattgtgttgatttgcattgccatgaccaccagtgaagctgaacattttctcactgatccagtagttgcacttgtagaaattgatttagtagaatacttgcctatgtgcacaaaagcgtatcaacattgtaatagtgaaaaactgaaaataacctaaatgtctcaataggaacatattaagtaaacaatggtctgtccataccatggaatataatgcagccattaaaaataatcagacatctacttgttctcacatgttgtgaaaaacaagtgtctgaataaatgtaaatcttatttttaaaagctctatacacgtccacatatgtacatctataaaccatccttgctttgcacagtaatgcatgaccataaaaatgaccttgcaagctgaagctgtgcaaagcaatcttaacagtcaatgaaggaaaagatgattgtctcatgacctttaaaaacattagtgaaaatattaaaagctctctgccaattataaatggggaaatgaaaaacatagtaaagctagtatttatttagtagaccataatttaaagcattgcaaatattgagaatctaagtttttgtcaaacttaccatgagcatttgaacagtgcttgcttgcatctcataatttgaaatacagagcaagtaccttttctatgccttggcaaattgttacactcctttcagttgtaaaatatctctaagagttctatgatgtatttataccagcatcacttcctttgggacatcgtctcttcattataaccaatatcttcacttatgttgataaatgttaagttccctttcactaagtgtctctggcttcttacctagagtttctatcaaagagcatggtatcagcattcccacagtcagcccaaattttatttccagtgttaaccgcttttcatttctttgctgtgttttttgtcttttttggccagtccctgttttaactctccagttttgtaaaatgtcatgtgcctctatcaccaggacacaaaaaggcaatacaactacacacgttgctgtctgtgcataacagatgcatagtgaccagtcactgacggattttgagataaatgacattattggttactgatcatgggacacacctgttattagtgacttgtgggttgaagagctaacagtgaagtttgtacttagtaattacagctaatatgccatgggaatgaaatttgaactgtgttgtttggggactggtgttatttaaaccatgtaactgaaattgtgcctgtcagaattgttcaaagcaaagattgcctgcatatatatatatgcaggatatatgtatatatgtgcatctccacacataccttatggaaatatataaaggaatagaaaaaggaaatatagtaggacacaacaaattcctaattaacaatatagagttgaatttggggaagggggtagggaggaactagtatttattgatcctacaatatttttgtattgtttgaattttcatagattaataatttttttagaacaaaattgagtagaagggctgggtgtgatggtgcacacctgtaatcctagtactttaggtggctgaggtgggaggatcacgaggccaggagttcaagaccagcctgggcaacataaggagaccctgtctccacaaaaaataagtgggaaaaagattgcttccgtttcccacagtcacaaggcttgctttgtgtaccttctggaaaaggtaaccagaattgtaatgagaatataagaatgctgaatacataaatgtttggggaaaaaaaccctatgatgtttatcttagaatatagggagaaaaatataaaatgagagtaagcgtgccacagcttagtgcagtgtctaagataccaactctgtgccagctgacccgacactgtcacttaacagaattgcttcatccccatcgacattcagtttcctatctgtatctggatattaataccccagaattattttatgataatgttagaaaagcacttaacacagtgactaacaactactaaatgctcaaataattgcattattcatgccatagagaggagtgagttttctgccagtgactgtcttcaaataagagtctgggaggtggctgatcggagtatttatcacattgggagaaatggaaccagatgacctgaagttctgagccattctcagagaccatgatgtgagatatttatggaaaaatctgtttcattttatttcaaagcaataatttgttatttatgccttcggattttataatactttttggaatgagacatacgctacaaaccaattcaagtaatagtgcattttacagatacacagagttttaatagggctcagaaaattatttaaaatgcttttaatcaaatgcaactttattaatggatacaattttgtataactctaatctcgctaattcgacttatattttaaactcttaactaggtaagaaacttaagacttaaaaggattttgagggaaaaaagtgaaattcacccctcccttttttctgtataagtagttcatgaaaaatatttgcaaaactctttatatacataaaactcaagctattttaaaactccattaaaaggaagggttttttttttaaatcatgggctattcaacatacaataatcaagctattttacaaatctgtgacctcagtcttaacagttttccaaggaatatactgttctttactgagtttttttttcatgacatctggaatacatttagatctttatgatattttgtgctcatttcttatcttgccagctgctaaggagcagaaattatcaaagaagatcaccgaactgacagacaactgtatttccacactcctgccctttgaaatctgccttctagtatgtgaggcaaccttcatcagcatgtagtagcatgtcggtgctggctagttactttccaagagggagataaacacctcaaaataagcaatgaaattgcttcaagtcagttttaaaatcgttagttttaataaaactaaaatgagaaagtgttttcacattaactgctgtgggccattttgttgttcctcaaaccactttaagtttactttctttcagttcagataatttagctttttatttaaaaacatctccacaacttttaaaccatgcttatatctctcttgtgagatatacaatacacaaattgtatatactaaattatgtatgccaacattttatgtgtgtgtgtgtatatatatagtgaatttgaccagttgcagtttctagtttctgctttgtgatgccagagtcacaattctagtcaatcttagggtatcattttagtaagtagtaactttcatcaaactttgaaaattgggattgcatatgttaagcatattttaatttcagttgctcagagaaactaacagattatcactgtataatgtgtctgctgttacttccgcttattgaagaaatcactgaactgccactgaagagtgggagacgcctaagaaaggctgagttctggaatgctgccaacacatgagaagcatacatttctcctaagatgtttagggttttcatttgaaaggagtcatctcattcagtagtatctatctctttaaattgacatggttctatatttggcatttcattggaaattatatcacaaccaagtcccttattagagtaggcaagataaggaggataggataaatatttgaagtatagtttatctgcccatcctggaaagggaagaacaatagcttgtccatgttcaggaagctaacatgacctaaaattcctaacgtcgcatgggagctaatgaggctgtttaccctgttccctcgtctttgggcagtattacagtaaacttaagtcagccttgcagaaagtcaagtagaaaaaaacacctgcttttatttgtgtaactttctggaggaagaacaagatgaccatctacatggccaagaaccttctgtggttcccttgcaccttgctgttacaagttgtaggatacccttgggtgtttttgctgtggttcagtgttgtaggtggaaggtacagcactgaagtcattttaataatttgtgttaataaagcccttctgtcaaaacttaccacaatgagtgaggcgatagagaagctgcattttagccactcataagattaactatgtgaagataaggatctagcctattttaaaatgctattctgcaaactttatgggaagtatattcttatttaacagccctgccaggagatgattccttgtgtctaatctctgtaccctgctctgtgatgtaagcattccacttgcttgttgttcaatgaacatgtttcctagctcgttataaccttaactttctcatttcaaagtgaatcattacatatttttaacattttcttcagttcaatattaattccccacacatatgcctgctagatcttctttcccagtcttatgttttctgtcagccttccctgaattgttcacagccacctggagttataaagccaagaattaatgcattctgtggacaggagagccagtgctggagatgaaggtatattcctgaatggcacatgaggaactctagtgaacaaccataactggtaaaaattatttttaaaagagctatttaaagtctctggaaattgtcccaaaggcatgtagttaatgaaacgtttattcaagaaaatctaaacctcgataagaactgtgagagtctgtgacactagagtcatgaccattccttcccttcccctgccccagaacaatgtgatggaagctccactccagctgtggccaagaaggtgggactcccccttccccagttccgagtaaagggctacaggagttccccaggaggggcaggctgccagcatcttcctctccccaagctgtgtgttgaaaaggctaaactccaggtgagggcagccttgagtccacgggtcctctcccttcactaagcccccactcataaagtggagcttcttccccaggcatgacgagctgagattacaggagctttggacaccctcatctcagctcgctggcaggacagcgatttcacatcaagagtcaagcaaagaagaccagaggctgccgccaccacctagtgccctgctcacaaagcacaggtgtcactccaaaaatagcagggcactgacttcactcccatctccagaacagtggcatagagaattggaaataaaagggagcatgacaactgacctcacaagactacaaatgaatactatgaaca

SEQ ID NO: 6929 - DNA, 293625 bp, Homo sapiens
  misc_feature (1)...(293625): n = A,T,C or G, or insertion/deletion polymorphism (see Tables 1-2)
gtgatcacggggacctgggtgtgaaacctggctgtatcactctgagttctaggaccttggtaaagttattcagtctccctgttcttgaagccatctctttgtccaacaaatatagtccatacctcagagacatgctgtggatgatcccacaaaagcctacagtttagagagtaggctcatcatatattttggctatcattgtcattagaattaattaaaatagcctttgttaagtcttttatttctcattcatattcctgtctattacactatttgtggacttgctcttacttctgctacagatggtgactcagaggggcaaaaatccttgttgaagggcagaatggcaaccagaatgcacacagcctggtttcatgatttgtaaatgtgctttttgtcattgaagattctgtggcaatgtcccagaggctaagagcaaaggtgtaagttttagaccttgtgaccccacttcaaccaaagcagccctgcatttacctgtcatatactgggggtttgccctaaattcatgtaatgaatattttcatcattaaaaataagtttaaaaatcatgatcttagaatattaatcttggacaagtccttgtaaaatgataaacagagaaactaagaaaagtttccatttattgaacccttaatatgtggaaggtactatgccaagagtttgccatatattacctcatttgaatgttgcaagagccctgtgagacatagtttgtcatctccattatatgaatgacaaagttgagggctgaaacgttagtcacttcttagagtggggaaggaggaggttagtgggggataaaatagagaagctaggtttttaaaacaaagcatagaggaaaaaaatatttaatgactgtagagcttggcaacatccctttcaatccttgtccaatttaccctgtttgagcaaaccagagaatactcatattgtgcacctttttcttccccacaaagcagtcaccttcctgaaatgcaagggccaaagcacgctgacttacatctcctgcaaatgacttgtatgcgcacaaagccagaaactcttcacttggttgtctaggactgaataaatcttcttcagtcctgaattgggcttgcctggctgggatggatagtagttttcctttctaaaacacatatgggaaagctctgtaaaaatgggggaaaaagtctacaaaaacatgaaaaagaggcattcattcttcaagtggtgctccctgtcctgccctccctccggacagaaagcttttccaaagagtttccaacagcatcgtacttcatagctgtcagctttagaatctgcagatgcctaaactcaaaacctcctgacattctggaatcaaaatttgacattaacttccagccccgggctactaccttttctccaacctgtgccaacacaacctcctgcttgtaaaatacagccaagtctcagacctgccagcctagtgagacaccctcagattgggtgagataaaaagcgggggctgggggcgggctgaggaacaacacacaagaaacaatccaagactggctcaatgcctcttttaacttccagagtgatggcagtttttggcaatgacaatgattatccaaacttccagttattaagcagtcattgctgatctttctatacctcattttctcctcaaaacgacagcagacgctattgtccccattttagagatgtgaaaactgaggattaaggaagtgatgtatctttctcagggtcatatgtatggtggtggggagaataccaaacacctctggcttcaaacctaagctcttattcctcttacaacactgatgggtgagaagaacccctgtgttctttccaaagtacaccaggggcagcagggttcccatacctgggggatgttgttgctcagatctttctgtgatgagaggtgaggaggaggaggtgattctagagacatgtgggacgctgctggctctaggcaccccagtaaagctgttctccaccactctctagctgcctgtcagttattcatctggcccaggagccacctcctctcttctgtcccccagctctcatttccagggtgaatattttgaggaccaaatgagggaatgggtacaaaactctttgtaaactttatgtaagtgctgtttagatataaacttttatattctccctgcactcctctatcaaactccctctaacccatcccaggggcaggctatgagcaaagtctgccttaaaactctactgccctaaccctcaaaataaaagatatatacaggtgaatcagccagactagaagtaggagagcagttgaagagaaaatttttacttttcctctgcagaacagcagaagataacaactttacgaaaagttccttccaagtctgactattcataaagttaaaacaaacaaaattacaagaccagaaaagtcaaggtgcatctgatataaccaatacacactccttttttttccagcggtggaaaaaaaaaccccatatgttttgtaattataatataaaatcacaactcatttggtaccaggaatgcaatccttacatcataaggatctctagtgatgagggcaaaacagacttacctttccgatgggcgagagacctaggtccttggaagaagtacctggagtgtggagctgcggcggttcccacgtgcgcgttcccccgagttccccagcagcgctgcctttgtgcccacggaggcgggggcgtgtatctgcgcgcgggagaggcgggtgacagtaggcaggctgtggccggtgcagccaactttggctggcttatatagcgagctccttcctctgtaatgggacgcctcgcctccagacatcctttcccactttttcagttggcgaattaaaggaacagccctcccagcggaacagggttagctcatgaaagacgcactcactcctggctctcggccagggaaggaacccatttgcatacaatttatggcgaaagtaggaattcccgcctgcccgcccccgaccccgagtagctgttagtgaaatgtgatttttgctttgctccccacacgggttttctaattgtgagacggatgcctggggagcaagagggagtaggatccgcagccctggctcccctcttgtacttggtcaagctggaaatgggaccagggctcgcctgggctctgggcagcagctgctcagtggcacctcggagcgagtacagggactgagcccagttcctggaaagaggagataaagcccttcaaaagcctggggggtttcaggtttctctgggccagcggagagataacccaggattaggtctcagcaggtggggatcgtgcgggacgctcacatcagccctgcttttcttgtgtgggagccagccttgcccagctgctgggaggcatctttgttccagccccagtgtcctgcagggcagtagctttttgacattgttcatgccctgtgcctggtgtggtcttctcagctgggtctccagggggaaggatttctgaggttttctcttagtgctgaaaggcgtcccccacagccctttctttaaagaaaagcaataatttaaaaaggtaacaacctaatccttgagccataagctgcgcctttgctttccagcctgccgtggatttcctccaagctctgagtcatccgttcgtttggtggttagcatgcattgagtatcctcagggcatacaggggcatttaagggagtggagaagtagcacttcacccgtgcctagagacttctgagcctgccgcagagcatagtagtttgtgacagtgaagtaaaatgaagcattaaatgtaattcaaaacgcaactaccattgagccctcccttattaagtctataatcaggtgctgtgcagggtactttatgaacactatttttgttcactatttttattatatccttgtaaccagtaagtaggatagacacaagtgtctcttttttacacaagaaaactgacgtttagagaagtaatgaaactttaccaagggaatacacctgggaagtgtttatattacaacactgggctccagagatctattacacgttactgtttaggaatagggtatgatgatatttaaacaatgttttatgctgtattagattgttaacaccatttgtgtagaaatcacagccatatttgaatatggaaaatatatttatttgctccataaagctaattaggagagatctttgatttttaaaaattaactactaataatggaggtctcaattatccacttattttcaatattaaatgatatcatccccacagttattattgttgctgtgggcctcagtttccccatctgaaaaaaaaagcaagacacgattaggtcatcctacggttgctttggctgtagtattttaggattctctgctaaagtgaccctcccagacagcaagaaagcccataaatagtcatgtcataaaaccgctcatttgaacttttgatccattttggctgattcaaatgttggttgtttgggaagttttaaattctgtgctttagccaaaggatatttcagtagcatgaagctgtgtctcaaccagcagtgagtggttcctactgagttaatctcttgggttagggattaaaatattagaatagtgtacaatatatgtcatatggtatataaactatatttgtatagaacatataatcaatatatttataattctatgtgagtttttaaataagacaagagcgcatgctagaaaactagatagatatggctttttcggggaatgtctcaaactcgaactcctctccccagttctttaggattctacaatcgttgattagtgtctaccacaagtggtatggtcaatcacagggaaactaagccaaatatgaccaggctggccctcaaagcaggaaaaggctagcagaggtgacaaacaagaatactattatgggttaagttaacaactatcatataagtgtattctgataacatagagaagagatgatttatgcatttttaggagaggctacttgtaaaaggcattttctccaaaaagctatgtggcatcttaagctttttggcatttgagtaaggagtgcccagacgaggacgtgttttccatccctgtactgttcgcagcctctgtttctggtagatgggtccatatgcaccaggtactctacaatacccaaactttgttcatgctaggatgatgccctaggctcctcacctccatgccctcacatctatttatcatccatttctgatctgacttcactatggagcttcctaaatggaagaaatccatctaggaagagatgtttctatgcactatggcatttgtaactctattaggacatccattgcatctacatggtataattacacatgtgcatgtctagattttcctcctagatgctaggcttcctgaggctggtgatcacacttgctttttctgtacctggcatagagccttgggtatcatagaagctcagtaaatgtttatagaatgaatgaagtaatggaggaacaaataaatgtttgacatgttgtgctttataattaaattcttccttttacaaccatagaacctgaaaaggaaactggattattgtgtccaatgcttccatcgcacagatcagaaagtggggtgctgagaggaagaatgacttgtctgaagccactatgcctgctttccaggaagaaaactgtcacaatcagaactgagcaaccaagccacactagacattacagcagaggaagtttatggaaatgaagaaccatttttcctcctgtttggcagaggccatacctcttggcatctaatccctcatggttgcatccttctgagaagcataagcacttttttccacttgagagggtagaatgaatgcatgtaaacaccacccctgcacagagcttcctgccaaagactgattttgttgttgcttgtttgcagttcttattcaggagttgctggtggaggctgtggtttagagaccagaggaatgtcatggtttgcctcaggtgagatcattctcatttctttaaaggtctgttaaatgtaatactttttcttccagacagaacagacaatgagtggaattttggccaggactagtgctgaggaagctgagtgtccacttccccatggaatcccctgcttcctactctgattacatactccttcactgttcccaaccttcctcctcctcttcccgggattcatctcatctggtgtgctaactccagtccaaaagtctcatgtgactccataattaccagaaatcttttccaaagccgggatggatctctgatcccacacagtgggccagtcatttaattaaatgcattttgttagagtcaagktttcccaacttgcttgcagatcattgttgagtggtcttttccaactcttcttgcttttccttcgacaacaaaggacaaaatcaagttcaaagaccatatggagtgtgtggcaagacatatgagagcttctctgatggatggactatggcaatttagctgcgccatcaaccaagaagtcatgcctggtcagcacagcagagtggagagcattggttgagtgtctaagtcttgatgctgcatcaactcgctgtgtgactttgggaaaatcgctttccccgctgacacacagggtcctggttagcaagtggggaattcccagggattatagcaactcaaaactctcaagtaaaatctttaaagaaataatttagaagtctccaagcctttgcacattcacttccctaggaagaaccctgtcttattgccatgacaaattcctttattatttttttcaagagttccttcatagtgcttcttctaacaaagttttatgaccctcacatccagagagaagggcctctccttcatgctcatctacaccaccattttttaacttttagtatgttgcacattttatttctcttgcctgtttaccctgctagatcatggacacctgagggtagacactgtgcctttccatctgtttgtcagcagttctctttgttgccagcatctgttgatggctgctgcctatgtcatgttatttgttaattattttgaatatcattcctacatatcatagtgtttagaatagcatacgacctgtcacagattttggaggtaagcaataaaggcattcttgaagtgacttttatgaaatgattagagaccttaattgttatcatcaatttactcattcatttgcccagctggtctgtgaggactccttgaggscaaggactgtgcttttcacctgtacagacccaaagcacttggaggttgattaatgttcctatgaaatgattgactgatcaactaattggctgcataatggaaaatatatgatattagcacacagtcttgggttctatttggcccaactgcttacaatgtgaattaccttgagaaaagcatgtcccctctctgaagctcctcctcttcttcttgggattcatctggtttcctgttttataaaactgagataaaaatctgtaccttgagtacctttcaaaattggtatgaagaccaagtaagagggtgtaagacaaagtgcttagtaagctgggatgccctatgtagagttttttgatgctaaatgatgtagttcccttccccgccccccaccccccaaatcccaacaaaaagctcaatctctgcatagctatattgtgtttatgaaagcacggaacccagcttctatctgaagcacttctgggctttgcaggggctggcagcagggagaggggagttgaagcyacctggtgctgtcttgttaaaatattcaaaaggctgcctcttcggaggttgaagggaaagaggaaaagtttaaaaaactagcattgcccaagctaaattagaagatgtggagttgtatatttccaacagagggctcggaggcagttttgatcatgtttaccggtctgagctcaggctgaggtgatgaatacaaatggctcaaaccatcttgggcttaatacaggtcacagagggaatatatagctttgaaatcaatgcaaattgaatttctttctttgattttccacagctgggttggatacttgtgaggaagtataatttgcttgttttccttctctcttaggtttcttaagatttcttttgtggaccacaaagaataacagtggctaacactgattgagtattttctgtgatctaggcactyttgaagcagtttggatgtattaaattatttaatctttacaatgagcctttgggttagtcctatcattgttcccattttgcagatggggggtgtgagacatggagaggttagggaaatgtccagggtgcatgggtaataaatagtagcaagaggattcaaacccaccaaraggactccagctcccagttgtctattattatgggtgctttcttatgtatttaatgtaacaattgcccaaaggcaaagatggcattctttgattcatgaactagattgagtgatttggagcttgcacataaagatctgaggaggcaaggttgtctttggttattttcctttgtccctgtctatttgtgccaatcctggagttttgggattacctagcatgcacttggtttcaaaccttaatttaaccaataatagctacaaaaaggagtaggaccttgggtaaattacttaacacctttcttataagttctccatctgtaaaacgggtacaatgataactgatactccttggagctagtctcaggattaaaagaacaatacttagtcaaatgcttatgccgttgcttgccacattctaagtaatctcaaaatagtggcctttggctattgtagataagtcacttattctactgtgagcctttactttctcatctgtaaaatgatggaaaagataatgtcagaggtatgtttcagaaatgtgctcactaaaataagaagggttaataaaacaaatgtacatgcaaataaaaatatacagctcttttcatcatgggacataagattttcagattgaccgaactgtactagtcaccctgtgtgctctaatattcttcataaatttcccctccatcctgctatacacatgcagtacacatgcacgcacgcacacacacacacacacacacacacasagagagagagctcattgaaatgagtattttactgaagggatgtttagtattgctctgagagagaaatagtttgaacttcctttgaaaagtagaactacatttgcccatccagtcaatagcaggcattattatttttaatcgtctttcaagccttgtacattctgtttctcaggtggaaaaatttaccctatccagagtcagctgggtggtttcacttgcctcagagccagaagctccctcggcagggcctagaggttgatggattggcatcacataggtatttgagtcactctcctccttgggaagtactctgggctggccctttgtcccttacccttcctaaggaggagagtaaattgaccctccttattttagtgagcacatactaggcagtcctaaccttgactacttccttgccccacagccttccaatggtaggggtggtgacaaatatacccacttgtatttgctaataacatgacaaggcattggcattatctcagtcctcacgccaggccattcccctaatacaagtgagaaagctgaggtgaggagggatcaagagacttgctgaaagtcacacagctkgtatgtggtctcacagaaggtccgcatatgaaaattactgagctactgggctcttcaggtttccattacagaaccatctataaagagtattattttatcagttttatggggtacagtggtataaagaagaagctcatgatctgatactagacagatgggatcaatcttagctctaccatttattagtgtttgaccttttttcaatttccttcacttatgtgaccccatcttgtatctgagtctgtaaaagaggagtgagaatacttaytttacagggataaaggaagggccatgggaaactgagtaaggattcccaagatgtgtgtttgaatccatggaatctgtgaatattatcttgtatggcaaagaagactttggagttgtgactaagttaaggatcttgaggtggggagactattttgcatatacttaaaagtgtctttataagaggaaggcagagagagatttgactacagaggaggagaaggcagtgtgaccaaggaacagagattggagtgatgtggccacragccaaggaatgccagcagacaccagaaactgaaagaggcaaagaatggattctcccttggagcccccagaaagaccaggcctgttgacaactggattttagcttactaaaactcacttcagacctctggtctccatagttgtaagagaatacatttctgtgttattaagtcattaagtttgtggtaacttgttagagtagcaatataaaactaatacaagaaataaatgggaaagtatctttgtgttgtgcataacagggccttaaaaacaggaatgcttaacttgaactcatggagatagagagcagaaggatggttaccagagtctgggaaggttctgggaggagggctggggggtggggatggttaataagtacaaaaaataattaggaagagtaaataagatgtagtattttgatagcacaacagggtgactatagtcagtaataatttaaatgtacatttaaaaataactaaaagagtgtaatcggattatttgtaacacaaaggataaatgcttmaggggatgaataccgcattttacatgacatgattattaaacaaaacctctcatgtaccctgtaaatatatacacctactatgtacctacaaaaagtaatgaatttttaaaaatggtaatggttagtattggtccaagagattattttctgggagaaatggcattaacttaccttgaaactggaatgcttttccatagagatgtagttctatgatgtaaatgcacattgctagattttcaagtagttttttttgtcacagctcctttaacatgacattttagttgtaggctgaaagacagagaaggaaagggaagttggagggagttgcaacctccatcattagcccgacagttttgaagtggcctgttgacatgggagctttgcagtgtcgagtggtttagcccacagtgaggagtaaatctggacttatacatgacattcctatcattccagggtcagtctgaacccagcaagtggcaggcttatctgggtccctgctcatccataattcagaggattcacccacagcacactttgacaagtgtgaaaagagctatgagacaatcctgctcaagttagagataagaaaatggggcccaaagcagttgcttgtcttgcccactctgagctaaaatccaggtctgctcatttgtgaaactatgttccacatggaggaagaagcttgcctagattggtgtagraccagccaaaatcaaaggaatttattgcttaaaaaaaatcctttacacggattgggcttcttcacttagaaaggacataaaaaggggaccgagaggagtaggtgaacacacaccaggctctctactccctctgagcttccgtgagcagtataatgttgcttctctctctctcctgcttttctccggttttggatgtgtgcagtgctctcatcgatgtggctgtggtatcagaggaccaaagaagccccctagtgagatgccaggcaagtttttcagacactgtatcagaaagcagcctctgtaggagaacttcaaagactttctaaatgctttggaacacctgcccaggcccacattgggctcaacttgcagatgaatggtatatggggagtgctcttgggtgaatatagatagatgactcatcgtttgagacagatgatggatttcccttgtggaaatactatataaggaaattatggtgaaagtttgataatccccatggacaggagtgggcaggggccaggatgaatcagtgagacagctgcattgtggaagaccaatccagggaagcttactttgaagtatattttgccagtggctcctttaaactagtaaagtattgccaaggagagatcttccgagagtctggcttaatgagcagaaatcagtcataagtggttgcttttgaaggaagtggaagtactttggcttttagcaagttgcaatcttgtttgctcagttaatctaagaagtaattcatatgaaattgctcctgttcagccatatttgacctacaaaaatgatactttaatatgattaaacttaatacagtataagccctatcaccaaatctgtgacaaagacaaattccagaccagaccttggctaaatttaaaaaggttttgcccaccgtcactcttgcgatggaaagacaggccaggttggtatggggcagggtatttgtgaaggacagtgagttaaccccatgcttgcagttctgacagccatggttggcagatgaatttttttctcccatctgtggatactgtactgatatcaacaccatggtagaacctaggtagagcaggaagacacccaataaaagagatgtcacaagctgatattgtgtatcagagttcaggtttaggcccttagagagccatggagatgaccagatagcaggggtaaaaggcatggtgttcttgagactacacctgggcaaacatgtgaatggatagttgctatctaatgagccccatggaagggaatggagttttacgctatcacttctatgacacaggggatcttctgtaaatagtgattgttaatttttattgagcatttattatgtgctggataccatttttagaactttacatacattaacttcatttaatcttcataacatttctatggatagatactattattagtcccaaatgaaggcatgygcaagaggaagttacttgatcaataataaatagctggtgtcagatatgggattaggacccaaaactctttacatgttgcacaggatcctcttcactatgttttcctgcagaggatgtttgtattaatccattctatgctgctaataaagacataccagagactggataatttataaaggaaagaggtttaattgactcacagtttcacatggctggggaggcctcacaatcatgatgggaggcgaaggaggagcaaaatagtctcatcttacatggyggcagacaagagagagcatgtgcaggagaactcccccccatccttttttttttttctttttttgagagggagttttgctctgtctcccaggctggagtgcagtggcatgatctcggctcactgcaacctctgtctcccaggttcaagtgattctcctgcctcagcctcccaagtagctgggactacaggcgcatgccaccatacccagctaattttttgtatttttagtagagatggtgtttcaccgtgttagccaggatagtctccatcttctgaccttgtgatctgcccatcttggcctcccaaagtgctgagattacaggcattagccaccgcgcctggcctgggaactcccctttttaaaaccatcagctctcatgagacttattcactatcacgagaacagcatgggaaagacccacccccatgattcaattacctcaccagtctctcccatgacacatgggaattatgggagctacaatttaagatgagatttaggtgcggacatagtcaaaccatatcaatgttttactgctttactttccttgttgaaggaaagaaaaagaagggaaagaaaaagaagaggaagaaaggaaagggcatgataatatttatttgtatttattttgttgactaattcttccaaccatttcttcattgcacttagattgatgggatacacaggccctgtgctaatagctattggcgatatagccacaaacacaacagatgtaatcactttccttttgagcttaccttctagggcaatgtttctcaaccagggatggtttactctctagaggatatttgctaatgtctgcaggcattttggctgtyggagtttggaggtttgctatgggcatcaagtgggcagaggccagagattctactaaaagtctgcaatgcagaggatggtctcccacaacaaataattctttgtcccaaaatgtcaatagtgctgtttgaataatgctgatctagtgaggatgtaggatgttgaatcgtgacaaatatccaacatagagattgaaaagacctgaacttggaccccagaatcactctaacatttatgaccttgggcagaactaacccaacagacatgcaatgggatagtgtgtagagacacaggtttcatgagatgggataaacactctcttctaatgcagtgtcttaggaagtaaggagacttgaactggtcatgccacagagtgcattcagaggggctgtgtcctgagtgagtcaccaggatcccaatatcatatttggagatggaagaagcagagctactcacttctaggggtgcagacccaaaactgaggatatctgccatggccagagaggaatggggcatgcaactggttcctaaatgttctaggccatgtaagacytctagattattgaataaactagtggacaagagaagcaacactcaacacagctgagactgaattttctaccgtcacaaaggagtatggcatggttgaaagaaataaagaagtgagatatatcttaccctcaagtattgtaatgtacccattatgaggagatatatatatctcccagcttctctggccagccacagaaattggtagttttctttctttcaaaagaaaacaattgcagttgaagtaatagctttccctgtttttatgaaagttgcatgatgaggagatgagacccatgggtatgataaactttccaatgcctaagcattctgttttggatgctaacctctagttaggaagtatatacggcttggcttataaactgtttccttcgtatattagatgttcccttctccaaggaccaggatgctgagaccagaggtttaagaatttgtctccaagactcctgagccccttattgctgtctgcctcaagcaatccaatagaaacagctggtttcctttgggtaactgagaagaatgctcaatgtcaaaatcattctccaagccttaaaatatccaacaagatttaaccggtaccttgaacagtggctggctcatactaagcactctataaatatttgttataagaatttatggcagaatctaatcacctttgaggtgctagcttggatatggaaaatttggctcacaactttccttgtaaaagcagccaattaaattcaatacagagttattaattatctacacttttctggaacaataaaaataacagccccaaccttttgttcttggtgattagatgttgtatgagcagggttggcagtagttagggttgccaaagcctggaactataatttttttggaactccaattcagtgggccaatgccccctaaggcatcaatatctttattttacaaatacttgttagattcagacatgtatcacaccttggctgcaagtaatgggaccatgtcatagggattgaaagtgatccatccatggtggcgggygcctgtaatcccagctactgaggaggctgaggcaggagaatggcatgaacccgggaggcggagcttgcagtgagctgagattgcaccactgcactccagcctgggtgacagagcaagactccatctcaaaaaataaaaataaaaaaataaaaaataaagtgatccatccagccctgaaggagtttataaccaaagaaacagtaattgtaaaacaatgtcataagtgctgcagtacagtcaccataagaggctatgattgggacacaaagagatagagaatcttatatttccattgcttgagtatttttaatgtccgaaaactcattgtcatagaaggaactacagagaaagaaagtgcactaatgtttactatgcattgagcatattttaaataagtacttactatatgccaagtactatgggaggttctgaagaggcagagaataaaagagacaaccattaaacacacaaatacacaaataaacatgtaattccaaagagctatgagtgcaatgaaagaaaagtcaattgcctatgagacactctatattagtttccacttcctggttttagttaatcccatcaatcctgaaataagtattttaatctgtattttgctaaggagtttactgaggcttccagctgtaaagtgttttgccaaaagccacccggctggtaagttttggagctgggattagaagccagaattgtccaacgccaagcccatgcacttcactccaagtcctcataagggagcctcatgagatatgagccaccacattcagagacagtttcactaatttattagaarcatgcttattaaaacscattctttctattcagcctgttatttactttatactcctttaacatctaccacccatataggggttaattatatactatctcatgttgatttataaatgtggattagtcttgtttaagtaaggacatggaaagtctgattctcccactcaaatccacccaccttctgtctaggctgatgctggatgtagaagttcctattaaatactccctggtttaaagcacagatcttgaaatttttatggtattggatacagactccagagtaatggactaagagaaccaaatggctctgagttcccttaaaatcatgcagagctgtgttcaaatcccatctcagtccttactagctatatgcttctaggcaagactttcacacctctgggcctcagagtccttacctatgacagggagatcagacgcctaccttcagtgttcttttgaggggycaatgagttaaagcgcttagcaccatgcctaggacacagaaagcactaagtagatggtacttattatcacttctaggttttcctctttattggaaggctctcacctgaaccatcaaagctagctgctcaacttttaattcatttctaaaactacataaggagttggaaacttactgtattctakttttttctggawttttttcccttgcttttaatagaaagggagtctgatttgttccactttttcggtgccagtggttctcrttctcracggggggcaattttgtcccccattgtttggaaatgactggagacattttgggctgtcacaactaggctgggtggagatgctattgacaactagtgaatggaggtcagggatgctgctgtacctcctacaatgcacagggcagttccccccacacttctcaacaaagaattatccagctgaaaaatgtcaatagtgctgagattgagaaaccctggtttatagcggctagcagaccggagcccgggtgagctccaagatgatgtcatgctgggggagacccacgctggcctgcggtgagacacattacacatgggggatcgcaccatttccttgcagacccctcacctcaccaccgccgccgcctcatatcctgctcaggtccctcctgggaacccagggaaacctcgcagcagatggggtttcgtttagtcacattctctgcagccagattggattacatcgccagcagctctggctctgagagaccaaagttgcttgatgagctctgggctggcctttcaccttccaggacccaagctcaccccaacacacaggaggagaggggcttgtttgtggttctatctctcaaaaggacaaaagctgagaaacagaaaaagccaaaaggatattggtatcttctgttgaaaatggtgcctggatatttctgtctttatttcttgtgtttattatgacaggtgataaatattccgtagtctttttgaagaaatatataaattatagagatctccagggcgtctgtatttcatacgtgtctttgttataggctgttagaacaccacagactgggtggcttataaacaatataaatgttatttcttatagttctggaggctgggaagttcaggatcaaggtaccagcaaattcagtgtttggtgaggacctgcttcctggttcatagacagccatattcttgctgtgtcctcacttgacagaagggacaagaaagctctctgagccctttttcatgagggcattaattccttcatgagggcactgccctcaccaccttcctgccggtggttccacctctaactaccatcacattggggattatatttcaacataattttagggggatacaaatattcagcctatagcaatgtaaaagagtcaaaatggctattaayttttgagcagttataataacataagtactgtgttatgtgtttaacaagtattgcctcatgtaattctaaaacgatgatgtgtagattagcttctccacttgaaagcagatgtaatggaagatcagcaaagctggctcacttcagggccacagctactaagtggaaaagccaggattcctactcctctctcacttcctgcaagacctaagtcttaaccactaagccagatgcttcttactaaatggtttagtttggttcgagtgagaagatagctaatgttttgcagaaagcatgactaatccaagatcttccagcaactgaggagtgatggaagcatttctgattcctcttgttgttgctctttagcaaatgggtgaaacaggtaaaatragttaccaaagcctctcatctctcacctgggcatgaattctatgcctttccaatatacacatgctgcctcctgcctcaaattccaggtgttcccttttactagatactacgctaggaaccagggacctaaacattcagtacctgctcttcaagaagcttacagtcaagtgtgaaaacaagacaaggaacaatgttattacaatgcagcagaataaatcctgtgactgaggtaggtacatgctagatgtaggttgtctaacccaggctatagggaggattagctgatttatctctgagttttgaaacatcctcaaagcaaagtagtttgggaaggrtaatctggtagaatatacagcatatgcaaaagcaaagaggcatagaagagacttcaggagcagtgagtagtttgggagagatgggcacatgatccataggggagagatcatgatgagtactgtgtgctaagcagtgtgcatttattcggtttttctgacctcccaaaaataacaatgtccacttaggaatagagattttcacaatatacaagggaactgcccacagctaacccttatgagaacttgctggtcttccatagggatttcggcaccaccagccaccccagtgtgcttggcactaggttagggacttctagtcaagtgatccttgaggccgtagtccacatacaacatctgctacacattctagtctctcatggctatgatgcatgccggagtgggcactgattctctacctacttaggtacgattctgttttgccaaggattctcctayacaatgatgtccttcctccctccatgctcagggaactagatagctgtttcctttcttcagagaggaagatagactcactgtatagttactatgaagagatttagcaccttcccgccaccagcatctatggaagatacaggggatgaggattctttgggaactagaatctaaacttctcgtttgtaagctatttttggataggaagcagagccacatggaaaagatttgataatgttaacaaatgacacaataatgactagcgaagccaggaagtgtttctttttatgctcaaatgatgcacttcagttacatagacttctgagaagatagccttcccattctatctaaaatgccattacatcttctaatatgcaacaaaatgccacctgatccataaatcatycctccatatttagcccagaataccgctttatattttagttttatctctattccttgattaccctactttgccaggatcctaagtaattgctttcttatgttcccctctcatgagattataaaataaggagagcaacatttattatgaacctctatgtggcaggcactgggataattgttttataaattcttgttcatggaatcttcccaaattgactatgggcagatgttaccagccccatattaaaaataaaactgggtgtgatggcatgttcctgtactcctgtgactcagaaggctgaggtgggaggatcgcatgagcccaggagttcaagtctagcctgggcaacatagcaagaccctgtctctgaaaaaaaaaataacaaaaatgagtaaaatggaggttctgagattttaaactcctggagggcttaaaatttatgcctttatytagctctgtatgctccaccaacgtgacataacagttctctgaatatggtaagaacaaagtgagttttattgaaattcttggactatttcttttccctactgaagtaaggcaatctccatccaaggttcatcttatattaaaaaaaaatatgctaggaaatctcaacagtgttgtatcmaaggagtcagagcattaaatattttgggctcctgccacaggcatttactgtgaagtaaaggacatgtattgttctgtgcttcatcgtgatagaaagaacgccagcgacgtcatgaaatattttaggatcagatttgcaacactgtgcttccaaacagctgtgtgtcacaatgaggggcagggcctgggcatctgggccaccggtgttcggctccttctcttcttctctcttgacctttagcagactccgtgtctctttcctttgatggaacagctaatgaaacacatcctttccttgagtcaatccctgatttcagaaaaatyttyagacatyktgtgtgtgtgtgtgtgtgtgtgtrtgtakgtgtgtgtgtgtgtgtgtgtgtatgttggggggatggagggaagagtgaggaaatagtttccattcagtagtctggagcctgatctattggaaaatccccaccccccaaaaggaaatgctacaagagctcttctttcacagagtttggagtggattcttttctgttgtgaagtgcagatgtgaaaaattcacctgttctcacctatggtcagacagactgttcagacttttaaaactgtggcaggagcatttgctagccctagttgccaatgagctggatatgtgggtttcccccactaaacggaacttggtcttatggcaattataaagccacattgaccatacttgaaagagagaggctgggggtggccctaaygagttaatggcaatgttcaagttcacttaacttttgtaatcatccagtttgcaaatgcatagcatctactaggagaatgtataatattcattaggagttaaagatgataatgagaatatttattcatttgtttaacacctatttgcctgtctcttgctatgcattgagtattgtgctgggaagtgaggaatttagatgaaccagggggtttgtccttaaggggctcatagcttagaacaggagacagacaagcaaagtgacaatggtaacccattgtgatcaatgtcattaaagggaaagtacaggatttaggaactaatagtggctcagggtgtggggaaggaaggcttgctagagaggattacacttgaacagaatcttgaatatgatttagagcttggraggaaaagggaagaaaggaggcagtgggagagaggcagagatgtctayccataccagagtgtgaagaggagaaacagcatgctgcatttggggaaagtccatggagtgagggtcaggaatggagggagggtttggatgagacagatgaaattggcagaatctcatgtaggaccttgagagccctgggaaggattttgaactcttcttttctagaaaagttataggaggccatttttggatgtcaacaaggaggaataaagatagatttgtgcttgaaaaatatcatcttggctataattgtgaagcagaattgcaagcagattggagttggagagaccagyraggggctgctgtagtcatttaagcaagaaaggatggtggctcaaaccagggtgggagttgcagggatggagggaattgggcagagtctagtgatattaaagacaaacttgcaagggtttggtgattgatgggatatgggtaaagagtagagagaagtaatatcctgaaatggaattggcaggtagggagaagagggagaagtgactgttgtttgggcctggtagttccagcttaggaatagaggcaatcgaaacaaaaaaattctgttgtagacctggcctcagcaggaaaccgtgcctgtgctytccttatctccagacttggcctgccagcacatacatatatcaccctctcacttaagatggagctaacagcaggcaaagttcatctcttagaggcccttaccctattggtttggcatgtctttattctcacagtccacagcagtaaaataataatattgcttacagagggatggcaccatggttaagtgcatgtaagtcagactgctggatttgtaaataggctcattcttaattagctatgtgagcttggacaagttactgaagccatctgtgattcagtgtccactttgataaagtaggggccatagctcttatttgacaaatttgtttaagagaaaaaaaaaagcagaattatatgtacatgagtaggcacctgataaatactgataaaacaaatgaatagttcttaccttattcttggttcattttctcttctcagtatataatactggatgcactttgtcttggggattcagagccctgctttctttaagggagaaagggaagttgaaaggtcrattaaagttttttggagaatctgtatcctgtgctgcattaggcatttttctcatgtcctctaacctcggattatcattctaaagtctttatctcatcatgttccttcctgttgcccaaaggatcaagttcaattttcaaatgttgagtaaggctttctagagtctgaatgtttgtgtcctctccaagttcatgttgaaaccaaatcctcaatgtgatggtatttggaggtggggcctttgaaaggtgattaagtcatgaggtggagtcctcatgaatgggactaatgccttcataaaagagaccccagatagccgcctttcttcttccactatataagggcacagcaagaagacaccaggaaggggccctcactagacactgaatctactgctgccttaatcttggacttcccagcctctagaactgtgagcaatacatttctgttgtttataagccacccactgtatggtattccgttacagccacctgaaaagactaagacaactttcatggccctttgtgacctatccccaacttgcttctttagccttatctcctgcctccacctgctaggtgctgactctaccctctgctttagatatgatatattttctatttatcaaaatgtcatgaccacatatggccccatgctaaaatgtgtgctgtaccttctgctgggactgtcctcagttcttactccttaattaaggctttgctcaaatattaccacctcttatagaattgatcattctatcctctgatccctggaaccttgagttttttctaatatagagcttattgcagagcatctcaattatttgttgagttcatctttcccttagtaaactgtgactcttcaagggaaaaacctgtaccttcttggccttggtagcccccaatcctaacccagaacgtggcgcagagtaagtgtttaggaaaactttactgaatgaatcagtggataagcmgattcaagttaaaactgaarcaacagtaggtagatgacataccttttttcctcccaccaccttcttgctttgccttgccttcaccccagctcagcaatctgctcagaaaagagagcatcagaactgaccaaaaaaggaakgaatatcctaagaaatkatgcagctacatattgcttkgcttgtgtttcctagataaggcattgattcctaggcactagaattatatactataattaaagagatttttttttaaatctatcaacaaagacctagagtttgaaaatctttcagttttctaatccaaattagggaaccagttacacagggtagcataggtcaaagggtagggctataagacctggattggctggctgaggataaataaggaagtgtagacttagtccaattgcagcccaaacttgacgtgtaacatttatacttagaaaatgtgtcattctcacgtcctttatacagatttgtccatcagtacattggattttcttaaacaactaccatttgattcccctattataattattgaagtgaattcactctgataaaatacagtccttagtagttcgctttaatgctctctaaaatattcttggaaaaatatgaacstttttaagttgacaagtgcttttattataaaagtttaaatagttgtgagggatataatgtaaagtatattgaatatatagtcatttaaaataaaactaactattataaatagatttaatggattgaaattccactttaatttgataccaccattcatccatttaaaaatatacaagtagaatcttccctaacagttgaaaacttacatagttcttttgttttccttaaatgtttatttccatttcatttgctctatagaaatgtttcctaatgtagtatatttttttatactggaaattctttcactgatcatgttgttatattattctgaaacaaaacatgtatataaattcatattaaaatttctttaatgttctgtaaatataagatgctaacaaaaccsaatttcttctggattaaattatcataacaattattagatgtatacaactgatcaatctaccatacacttattaaaattttgctaaatgtgatgtgaaacataaggttttattagaaatgcttctctgaatgaggtgaactttttaaaaaattaggccatatgtctgctgaggaatattcattattgctaacgtgagatggtatttcataaattttatttacttttcattttttggttgtaagcactgagaaacctattcacaaaaataagtagatgggaaaagaaaaacttttcttatagcagtgttataacttcttaccaggttgtatgccaaaaatcacataaagatcaatcatcaaataggatttttaatactttctcaggtgacattttaattaggttccccttcagttttgttgtaactaaagcattgaaagtcatctgacttgcagaatgatttgctgcaaggtcattagtcattcactttctcaacactttttctcgaaagaattttgagttgtacctttgtttggtcccccagaaatttttataccccaaagcaactcgagatgagtgagaggtatgaattccatttgtaaagtgagagaaaagcatttacgaaaaagggactctcttcagattcctgagaaagagtgcaaatgaaagctgagaatctgaaaatttccttatctctgccaactagagcccatggaaaatctttgagtaactctgggggtactatgcatcacagtctgaaaattattatatgggatgtactttctatacttaaattaaatttccccatggaggcagcattgttatacaggtgacaatgagataacaatgcaaagaaaccagaagtcaagttcatatcgacttatatagctctgtctccataagtcagaaacaggaaaaattaacttgttcttcagcaatctaggttgacttcatgaacgagctggcgttcaaatgaatccttgaattgtggaaacagaatgttaaatctggaatgaacttcagayatcatstagtatggagaggacaattaaatgttgacttttacatcaatttggattaaatatttgtgattgcttacaattctgtgtcaagaagtagtcagaggaatcatctgagatctgtaggaaagcatgttgtgattgattagctatgcctgtcagaggaagcagggagagaggggcacaggtgatctgctcttgcccccctaggtacatagtccttatcacatgaaccacagggaaaactgaggctgactgagagcaggaagcttgaccaaaactccacagtgaattattgccaggatgggtagaattacatatgttttattcaacatttggtggtcattgtaaatttggtaacayttgcaactggaaaatttggggatgttttagagctggaagggagcaaattcttaattgagcaatacacgctgtcctttctttcaggctccttcacatttgatctctgtgcaatttgataagaggaggraatgggccgtcaattatgaagagactgaaaacctgaaaatactgagtatggtcttagttccctctccaaagggagctcaggaaaaatgccaagccatacaagccactgattactcatctagctattgtttctacctcaccctggcccaggaagacagatctactgaggaaaggtaatagaggctggcaaggttcctacttttacatctatctgtaatatccactcattcttagcatcttgcacatccacagggccrtacaggagtcttcttgccttgtattattgaatcttgggataggggtaggaacagacagaggtattagcagagatccaacaggatgtaaaacatacatgttgatgcaggggttaactttatgtataataaatagatttttaccatgcataccaaactgaatattccttcctcctttttctctcagacctctttctatgtgtggctcattcttttactctacaacataatgttcagttgattctggactttttctgtgacaaacaatgctgtaataaacatcctccttgtgcattcatctgggtgcacttctgagaatttatctgaaggataaattcctagaagtagactgtctgtaacatagggtctatgcactttcaatttccatagattctgccaaatggttttcttaagaggttataccaatttacactctcagctatggtatatggtaacccctgctttcccacaacctgccaacactgggtatttacaaacataaataaatggagggtttgaataattgtagttttgaattagacttggggcgtccctctcatctgccccaacttgtgtctccccaaagcaacctaactaggggatggctaatgccatagactctgaggcttactcagagcagaggctgaatgctcctgcttcagtgggaacagggggtgtttcttcagtctgtgccctacttggcatctgtccctgacagacccagccagtgtggggagccagcctctctaaccataagaaagaatggattggaaacaaattgatcttttcacagctggctgttcccctctttcccctcaacttggactcagctcagaacaaggttgccgatgttctgctgcaacaaagatggcattattgaggactgcctctttggggggaaatgtccttctccaagaatcgcctctgtagtttcaactatgacaagcctggagaccgagcatagctgtgcatctccaagggtctccaaagcgacacccaactctatccgtcctgttgatgaccatgtactcttctattggtgtccacaactttatttaaatgatgtcagatgactcaattcaacagaatctaaccctttattcatcctccctggagacctgtggtcagtgggcaggagagtttgggattcaaaaagaggagaactgtgtgaacacagggaaaaaggatctagtgtttatttctagcaacaccattactattgctgtccatcctattattctgcattcttttgcttcatagcatttttttaactgaaagaaatggctccacgaaggcagaaatattgtttagtttaaaactgcatcatcagttcctagaatacctccttatacattggaggtgcttgatacctatttattgaatggatgaatgaatttcatgagcacctgtgttggacaatttaaygtacatgatgatatttaatattttaactctgtggggtatatatattatctttatttatagctaacgaaattgggtctcagagattaagtaatgcttccagaaccacacaactggtaattggtaaaactgagatttcatttagacctgactgatcccaaacctatcttttagaacactgggattccagtttatctaagcttaagctcaaaagtattaaaatattttgcaatcaatgagggaagttgtcatcaaggacatttccaggtgagcatggtgtgttcaacaggaagagaaactcctccatactcccaccaaagtgagcaagtaccaaaatgttaagtgttaattaaatcttattcatctggggacaagcagtagggtgaatttatatgcatgtagcaccgattttgagctaagtaacaaggggattctgaaagacccttatgckgacaatgagtgaatgtaggcaagggcactaatatttaacaaagttatgctgtgtgctaggaaccatgctttaaatttatgattccacttaatcattataataatttcctttctttcctcttttattgtcttgcccttcccttcccttcccccttctctccccttcccttcctctttccctcccctttcattccctttgtccttcccttcccccttcccttctcttcccttcctgtcccccttctcttctcttctcttccctctttctccttctcaccctcccctcccctcccctccctttccctctccttccctccctttccctccctttcccttccctcccctcccctccccttcccttttctacccttcccctctcttctcttcccttcccttcccttcctctcccttcccccttcccttcccttcccttccaccttctcctctctcctctcctctcctcccctccccttcccttctccccttcccttcccttctcccctccactcccctccccttctcctttcccttcccttttcccctcccttctcccctcccctccccttctccttttcctccccttccctccccttctcttcccttccctttcctctacccccttccccctttcccttcacttmcccttatttcttttctttctttttctttgtttctccctccctctctcctcttttttcttttctcctttctttccttcctttctcctttttttcccttctttctttttaaattcccagacaagaattttgaagttcagctaaggtaagccacgcatagtgacggaaccagcattcagatttacatctcttgctacccatcatgtcacatagtgttaggcagagactggggtctcagttgcctaagtaaagtcataggcatgaagggtgctgcaggaatgactgagtggcaggctcctgacagcctggttgatagaccccaaggactacttgggttttggcgccatgcctagtatgactttatcctttaactgtttctcttgtcagtcagccccctgagggagccctgtctcctccttgaaactgtactataatgagaggtctccacaagggttccagaaagccacacagtgtgctgtggttttcccgagaactggctccaaggtagtgctctgagatcagtccttccagctcccatctcaaagatcttcaaactccaggctctcaagggttttgagctgccagttatgatgaaatattagcacagaagaaaataatttttttttctattctgtgtttcttaccaggacaccatggtttcagaatgatttatatactttgaatattttcaaaaaatttctttcaatgttgttccttctttaggtatttctcttatcacttgggctcagcttgatgcttctctggaatttttctttttttttttcctcccatttataaaataccaaacatgtgtccccagtctggatccatgtaactgaaaatcatggggaaattctttatgtaaaaagccctatagattgtttcggacaaaatcaaccccaaagagtttgtccccacaatatttgtgaataaaatcatccctctgaaataaaaacaccaccttaaataaaggagttcctctcaagcattttactctatatttattgtttgttcattcatgccatcatttgaaaaatactaattaagtatttaccctgtgttggtaattgtgctgggcacaaagaacataatagtaaatcacataaaatwccatcctcaaggatcccatgttctatcatactagagaactgwgtacagctgctcctcgacttatggtgggattacatcccaataaacccatcrtaagttaaacctatcataagtcaaaaatgcatttaatacacctaacccactgaacatcacagcacagacaatgtcaggcactttattacatgtagtaaagttgacatgactcttaatcctactaacaaccctaggagatagattctgttattattaccatttcatgatttaggaagctgagaatcagagaggttagtggctggggttgaaattcaagtagtacagtgtaagagcctttgcttctcctagaggctctgtaaaggtctgttgaataactgagtagacgatagattgattgcaatatagttcctctgttgcctttttgaagtgttagtttagtaagcaaccacagagaaattattatctactagagatgggaataggaacggtttcctaaatcagggttggccaatagtctttagttcaaactaaaagccatcacttctgcaacattatgtgtcaagcatgagctatatgacatgaaagataaagtgatgtagcaaatgtattcataattcagcaatatgagattatgagaaggagcatattcctgtgcactcactctgaggtcaaaggagacacccattttcctcttgagggaaatagtgagaggtgtttacctgaaggcccctggtttgtgctcccccatagctggggagagggagctgctgccgccctttccagtaggagttgtatattctataatgtccttatcacaattcctttaagggcctccagcactttggaagcatagaaaaaagaaacaacattcctgcatcgyggggccattgaygaataagaatgtttataagaaggcaagcatctttgcactctatacrtttccaaatcttttagaaacatatctaagaacttcttagttcccctccatggttactggatctacaaacttggaatttccccattggccctctgattgtatttggagtctgttcttcatcttgtggatcctctgggctctgtcttgaactgttggaacattttgctcccacagctrttggaagtgacccattaaggtagccagagtcagtcactcagcatcttaatggcaagaccaaaaggggtgaaagaaatagaagtcacggttagtaagcgactgacctcattctgcaggaattctttctggaaagagagcagtagaatgttgtgacaggcagtaagtcatctgtaagaatgtttaccgtggaattctagcaaaagaaatggctcaagaaacttcctgggtaacacaaatagagtctgctcagaggccccaaaagagagtgactggaaaactttagccttgtgagggaggctgtctactccagtgttggagtcagctggaggtgcagcagcgcttgagctatccaaactgctaggatgttgttaataaaagaaccttctcrttctcgagtcaacatggctaaaacagccagccatgagatgtatgggaaagaagtgcagagcaagttgttatttattgaatgtgtagttaggaattactatttccatttcatggaggcttaagtagattgagaaatttgtctgagttcacaaagtttgttaagtttcagactctgggtttagacccatgtgtttctgactccaaatcctgcatggttggcttttgtgagagcaaggttacacactgtacacattttttttcctccattgcaccattcactgtcctaggtatatagaatcctggaacacaggattggaaggacctttaggcatcccatggtctaatcttctcatggtacagatgagaatgggctcagagaagggaagggccttgctcagactcacacaaaggctagggccagaatagatggtgcctgactctcagttcaggrtgcttattctgacaaggcccgtcacttcacatggatatttaatgtattttgctagttggttaaaaataatgtaatgtatggcagaaccatctctctttcttcaaggtaagccattgctaagtctcgagtccttttttgtcccacagctccttttttcattgattattatcatttggtctataaagcctttcaccttcatttcagtgaacaatactgctgtgggagacactggagatgcaaagataaatcagtcctggttcatgagcttcaggaacttaggagcagtttggagagtcagatatgagaacagcttgttttcatacattattacacaatcatatgtaatatatagctggggggatatagaagtgaatatgagaagacctaccccaacctgggaaattagaggagtcttcctgtcttcctggaggattaattgattaaagtgactcattatttcattcctacaacaaatatttagcagacacctcttctgtgtcagatactcttccagttattaagggatgcagcactaagaaagcaaaaatattcctcaccttcatgggagaaatgcaacaagtgtaactaaacaaaatattactcaagtttgcagcagtgacaggcccataacaaggcaaaggtctacagactaatattgggttgaagatttatttttacaagggtggccagggaaggcctcttcaaggggaagtcttttgrtcaaagaactaaagcaagtgacagggaagaaccttgcaaatatctgcttcccaggcagagtaaaaaccaggaccaatgtcttaagtcaggaaccagcttgatgtatttgaaaaagagcaaaagccaggcgtctgtagtcccagctacttgggaggctgtggcagaatggtgtgaaccccggaggcagagcttgcagtgagccgagatagcgccactgcactccagtccagcctgggtgacagagcgagactccatcaaaaaaagaaagaaacaaagaaagaaagaaagaaaaaaagaaacaaagaaagaaaaagagcaaaagccagtagggatggaggagagttattgaggttactgcaggaggagatggagatacagacatagacaatgaccagattgcagatgttgtgcaagtcacaggtgagtaggtcttgtcaataatttccctcctggtcagcattgctggcaatactatggcatcatgcatagagaaagaaaaagctaatagcaaatgaatcactctgatcatgcatcttgagatgttgccatggattacaattaatgcgttcctatccacaaggccagattccctcaaagcatctttttgggaaatgcagcgagctctcctggccccagcactcccacccaccccatcacacaccctacattcatcatctctttctctgtttctttgtcatgttgctaacatcccttgatggagatggtgcaactccaagtaaaactgtctccataaatatttagactgaatagaaaatgtgccaaagatgcaaataatctgtccagagggagaagagacctttctctttgttgttttcttcaggcttgtaatttaattcgtggatacatgtctttgaataatacataactatcaatttacctaaaagagtcccatagaaaccttagcctcttcatccttctgccatgcccctcatggcattttcttcttacgctggagtatacatttctctgyttttcttttatccctttctttcttctttattcccatgtttttgatcacatactgtgtgtcagcctctgttaagctcatctgtgcagagtctatactcactgcctgtcctcctctcatagtcacttgtcaattcattttcattagccttctccctccaccctcctttcctgagtctgttcccactgaggtcaacccagtgttcatattactgaacccagtggccatctttctgtttcttcttttaccagacctcttcactgaactagataatgttaattagtcctggctggagcgcaagtctcctttgacatctatttgcactgttcctctgcttgaaccactctgtctattccttctctgtcccttaaatttttggcttcttgtgggttgggtttttggtattcttctttgtctagcaccacccttgcttgccatcgtgccctcattcaggcctgggctttgacttgaatagcttctgaatctctatgctctgcctgtattggatagctggcaggctatgggcatgggctgctaggtmccagacaactcacactctcatctgataagtgggttttaatgtgacccttgttgtacctccttatttctatttcagtctcacttactgcttcctctttatctgttttcaagtcttcctactagatatttccttaagaaggcagagaaaccgtgctctcttagtaattgcacaattgaaattattcctcttgaatatttgatgatgacatattttgacttgatatagctttttcaatcttacaggaattctaaagctggaggaatgtttaaactccttccagctgccagtttcacgtaaagaactcttttctaaacctggggatatgagggactcttacattctcctttaatcaaatcaatttaggctgaaaagaaggccaagttgacagccagcatttcactgctggctgtgtatccatatacgtatgtatggatgcttagaaaagtggaatgctagtgatatatatatatatgcatatatmtatacatatatctatatatatagacatatttctgctttactaggtgagaagagttgcttgattttaagggctctcaatcaacaggcaccaaatgaacttacagcttgcaaaaatataaagcgctcaaggccgtacagacaaaggtaagggggcacagacctttcagttgtctacaggtattatcatctgaaattgacatacgaagaaagaaggtcagagaagaaatgtgacatgcccaaggcaatccaactgaaaaaatagccaatgtggacaataatcccagtttatagcttctagtgcaatgacttttgccagcacccagcatatcagaagataaacccactgactttctttagtgaagattgcraattgtttaaatcagagcatgtgtgcaaagtccagggtactatctaattcaacacttctgtaatttgaaagctaataattataagaattattgtccttgtccaactgttccttatactatttcattgttggttaatacattgaaaattacgaaaccttatttttgattggaagagtggtataacttctcttaggaattatactactagtatcctagtgaattatgaattcctacacttaaggaagcacaattataatagcattgtttttctttacttttgccaataaatcagtaagtactgcatgactacattctgctaaaacttaatagttgatgtggaagggaacttactccttattccatatagagacactgtagagtccctggaaatgctggctctcctccctcttctcatctgcccccagcaggggagaaatgagtttatgtattcaattgatgagttttggagctgctgaatatacttagctcaatgttcttattgtggtctccggactagcagcattaatagcgtgaagcaacgtgttagaaatgcagattctcaggccccactccaggctcctgaaccagaaactctggagatgggcccagccatctgtgtgttaacaagcccaccatatggtcctgatgaccatttgagtttgagaaccactagttagctggttccttcatcctctgtggacctgcctgctcacagagaggctgtgtctgttttctgccttgtggttaaaaaaagggtctgcctgttggagttggggaaggacatgcagctatgcagtgctgtccttgaataggtgttcctgtatgctaatttcaggtgcactgttggaaagcccatgatttcagatacctaaaccatgttctccaaccaaaccttatctaatgaagatgacattttaattcccttgtttaaatatgactctaatttcaaagtaggaagttggttctgactttgtgggtgrgaagaggatatggtgtctaaacatgkgccccttaaaaccaccataatagccaattacttattctttatggccatatgtcaggtatattttaaagttggaaggagctttggagtggtctagctgactttatagctgctggcaactgaagtccagaaatgggaaggcattttctcaaagtcactcagaaagtaactggagatagcaggctcccagtcctgggctcagacccacacatccagccaacataaccatggtgcactttaaccaattccaagttgaaacagaggaaatgcatatttggagcaatttatctcatcacattaaagatttcctaatttacatttctgcccggtaatcatggatgcctctgtatctaccccatggtcccctggtgaatatggcctctctcaatgtcaggtccttgtattcctgccctagcttcttgcatccaccttccttgacaggaactgaaaatgaattgcagctgttcatcatctctatggaggggaccaatttcttactcctaaactgagctcatcccagggaaaacacatagggcaatgaggaattcctcttaactatgacactaaactaccccttgtttttttttagtcgtttatattttcagtctacagtctaattatttctccaaattgggttacttgatcacctgccaaagacagtttctattcattaacaaatcttggccttcagaattatattttcaccaatctaattttcattggcattatgcttttctgttttctgactcctcttatcggttgtctacttgtatgcatttttcatgttcaaaagtttcatagcagctcctcctcactttgatgctagggaccaaccaatttatctctacttttatggcttgatattgccagctaatctttattgtgtaattactatagccagaaaaaatgttaagtgttttatatgttagcttaactgattctcactgcaatctatgaagcaggtactgttataatttctattttttagatgaacaactgagacacagygaagctatgtaacctttctaagattacccaactagtaagtggtggagtcaacatctgagctttggttatctgagcccataaattgcccgttagccctgcgttatactatgatcatgcacaggggtctggaaaatgccttgatgttatactttccttcttcttttttttttttttttttttttttttttttgacagagtctcgcactgtcacctgggctggagtgcagtgacgcgatcttggctcactataacctccgcctcctgggttcacgtgattttcctgcctcagcctcccaagtagctgggattacaggcacctgccaccaaacctggctgattttttttttatttttagtagagacagggtttcactatgttggccagactggtctcgaactcctgacctcgtgatccgcccacctcagcctcccaaagtgctgggattacaggcatgagccaccgtgcccggtctatactttccctcttgaaacaccattcctttctttgttcaggatctactgtggcaagcatttgagctcaggtcatgggtctccaaagccattttacacaatgataygtgtgatggttttctgggatggcccagctagcaggtgggkgagggatcactgaggtaggggacagtgtaattgacaggcttcatagaagctaagcaagggacacatttagttcaagttcagtggcaaggggaaaaaaactaatgattgggagatgcttaggtgttttctagtagtgtacaacaactaaaacttatccccatagacaactcttgggtctgaagatacccagcaatacagagtatgtggtagaccctggagatcctgctgctcaccctgtgttccagattggccccaggtcataggaaggtccctggaagtccacagaaaggattctcaagttctggtagggggaaatttcaaatgtatgcaacccatagaaaatggattctttggggacacctacagaaatcaaagatctaggcagaatttgttcctaggatctaagaattgtagggttaataaaactagctgtttatagaaaatttatgtaacttgttttactgatccaggcagaatggatccagagtttgtgttctggcatacagactaaactttaggagggatataatgactgagttgaatcttgaaatgttagtaggaggtagacaatgcaggaagatggtaaaggttgatgttccaaaaatgaacaacttatttcctggtatcagttaggatgtgtttggttgccactgacagaaaaatctgactagcaatgggtaaaacaactctgagtttattttttcacttattaagaaatctggccctaacaatatcaactaatatcaaagttggtatctgtatttgatttgatttttcatgagcatctcatttggcagtcacagttttggacatttcactcaaatcaggaggaagggggatgagtggcattacctacacgcaatcctctttatcagaaaaggaaaagtttttttcaaaatacccagaaaatttccacttgttcaggctcaaataatgtagccatttctggttgcttttccagattctaaggactgtgtgttaagttaggttagccaactgacagtcttccatcacccctgccatcccggaagatttatgaattcagagttggtgtttgctctttgtttatttcttcttagtagagagcacagtgtcatgcccaaagaagggataacacaaaacattcattgcaagaataaataaattcagttaatctcaaaaggcatttattatgcagtgtgacctgcatgccaggaactgtataggtacagatcaaggaacatagagcccagggactggtgaacagatactcaacatatacatgttccaatatgccatggtacatgttaggacatagaaacacataggggcttttcaagggaacccagagtgggaacacacggcccatgttagagggctgaagaaggaggacaaaaagggagtcagtcaggatagtttcaattatgcttaggtaacaaatgatccctaaaccttaatgtgcagctacaactttcaactccctactgtgctatgtggccatgttgcttagctgtggctctgttccacttcagtctctgcctagggcccaagctgactgagcagcctctatctggaactctgtcagatggaccagagaatatagcaaccacacattggctcttagaagcatcttcctagaagtgacacacatcacttctgcttatgcttccttggccaaaacaagtcttgtgamtctaccagaattgaacaggatgaaggtatataatcctccatgtgaggggcacaggatagaggcacaggataggtgagcagtaatatcatctcctacaaacagcaaggacagggcctaactggcggtgctctctgctccttctggtttacctccccgtctttctcctttcactagtgaccagctgtcaacctcacttagtgtgggagagctgtgagctgggctgagtcgccggggatgagttggaggagccaggagactgacttcatctccacctggtccaggaagggagactgagggaaggggcctggatccagagctggaaagatcttggcaggatgtggctttttaggaggtagaaagatggatttcaccatctgtctctttcctaatgtttggaggggtgttctcccgggatatagaggctggtggcccagatttctgagacatctttgtcagccagcactggctcagcacatatcaattgtgaagatcaactcctggcaagtgtggagtttggcatctacaggggccagtaggggagtgaaccagggatagggacaatgaccagaatccttacttgttgtcagtggaaataaacacgcataaatttgtctttagcacacgaagacccaggataagacccgttcgacctgcctatatggagccttgggtgagagatcatcttagatttttctgccaccttaaggtatttcaaactcccttatcttaaccctgcctgccagctgtgtttgtggaccctgcattcaaatcctcctttaaaatgctatttggaaaataagctttaagatcaactgtttttaagatacaaactcaggcttctgtctgtaggcaccaaaaatcatgccctggacttctagcatcaaggtagttagaatacctgttaagaatacatggaattggccaggcacagtggctcatgcctgtaatcccaccactttgggaggccaaggcgggcagatcacaaggtcaggagtttgagaccagcctggccagtatggtgaaaccccgtctctactaaatacacaaaaattagccgggtgtgatgttgggcacctgtagtcccagctacttgggaggctgaggcaggagaattgcttcaacccgggaagcagaggttgcaatgagctgagattgcgccactgtgctccagcctagaggacagggtgagattccttctcaaaaaaaaaaaaaaaaaaaaaacatgaaatttagttttatttctggctctgaagctttcttggaccatcaggcactcattaacttctctgagtctcatttttcccatctgttgaatggagatgctgatcatagctctcctgcttaccttaaaggactactgggggaattcagtgagagcctttacttactgaacatctactgtaaagtagacattggctttaaracaagtgggaacacattgtcatttataagatttatgtaaagtaaataaaagaaatttttattgttgtagttattctattggagaaaattaaagttgggtayacaatcacggactgyacctgattaattcttgcatctgattcttatgcctctgtcttcagaatatttgtaataatctacaattgtccattttggactgtgaatcttttgaagttgaaattaccttttcttaggttggcagtgtttctcacctggattatggcagtatcctcttatcttgcctctctgccctcagtctcagctgctccaatccattctatgcatagcagacaactataaagatatttcacttctgctgaaaatccttccattgctttatgctcttctgagacatctacttttttagactctctttagagaatctttaaatcctagcctctgatagtttctccaggcatatctctcaacacatctcttcctaccccactaatacagtcatgtgcattcccacagagaagcccaaaatcaatattggagtctctctgaaatacctgaatccttaatgaggtcccagcaccttggacctttgcatagttttggctagaacatctttgttcctgtgacttcccacttaggttcaacyccaaaatatctctcagatttcaacttgaaagtcccttcacttcctctggggaatcttgcatgatattcctttttttyctttttccttcctagctcattatcaaacctgacatctagtaattgtagttgctattaggcagtgtctgtttcatttttaggtggttactagactttgagctctttgaagacagggattgagtctcactcatattctcttttcttgaattctttcctttcttccataaatagtacgtgattttccactttgggccaggcacagtattcttaacgtgctcatatcttcatgcctaatatggtgccyggtacaaagcaagcaataaacatgaatgatggaatgagtcaaccagtgaatcaaaggtttagttcaaacaagttaagccctccctatggtctaggagcttcgagaggatcaacaccttttctaacttttgctttttaccatattctagttccttttttgtttcaccctctgacagagagaagctgagtgggaacaggctgccacatttttgtaggatatatcatccaactggtgaatcacccaggcccttgatttggcttactatttaacttttttttttttcttttttttttttagatgggctgtcactctgtcaacctaggctagagtgcagtggtgcaactttggcctgctgcagcttcaacctcatgtgctcaagcaatcctgctacctcagcctccagagtatgggactacaggtacagtccagcatggcaggataatttttatatattttgtagagacggggtctgtctttgttttccaggctggtctcgaattactgggttcaagcaatcctccggcctcagcctccaaaagtgctgggattataggcatgaaccaccatgctcggcctatttgaccattttaatgttcttattaacttgctctcctgggtggtaggaagatcatggcatggagtccaaggttctctcacttgcaagtgtcctttgtgcacttcgctgagtgtccttgtcctcatctgtaaaaaggagatggtgatatttagtcttgtgagaaactacttgagagaagtattataagtacctggttacttgatgtagtccttggcaaagggtggattctccaaaattatatcttcctatttctttcattcaacacccactcagccaggataagaccataccagagcaaggagggggactataaataacagcaaaaggacaatatctgcagagaaagtagggagctggaacactgactaaaggaaagttttcatattaccctgtgaattgttggacaaatcattcattgttttttgtttgtctgtttgttttttgagacagagcctcactctgtcatccaggctggagtgtgcagtggcacaacttcggctcactgcaacctctgcctcccaggttcaagtgattctcctgcctcagcctcccaagtagctgggattacaggcatgcgccaccacgctcggctaatttttttttaattttttttttttgagacggagtcttgctctgtcgcccagcctggagtgcagtggtgtgatctcagctcattgcaacctctgcctccctggttgaagcgattttcctgcctcagcctcctgagtaaactgggattacaggcatgttcyaccacacccagctaatttttgtatttttagtggagacggggtttcaccatgttggccaggctggtcttgaactcctgacctcaaatgatccacccacctcagctgcccaaagtgctgggattataggcgtgagccactgcgcctggcctggctcattgtttttatatataaaacttacatattttctttyctatgggagtgttgtgattactaaatgagagaatgaatgcgtagtcattcttcaagggattgtcacacagggaagcttcaatatgtttgggtaacagtaatattatatgatccattttcatttctatcaatttggtcagctaaactgtactttaattctgagattctttaactccgacagctggtccagactggcataggtcctgggggcaatgacagagtccagatgtccccatgggcatgacttgcaaattatgtactttgacagaatatggtgaggacaagaaccagaccrtgcagcactattytcacgccagctgcagagtctaaatgtgtttcctgacacctcagaaccttcttgggggagggcattctgggctgggtgatgggacatgctgggattttgttgctctccttcycttgtgggtcttaatggaaaagctaagtcaccagcaacagagaaatagcggtgtcaggcattgttgaaactttccatgtattctcatgacacatcatttccagttataaaaargagtggaggtgttgggctctgttgcctaatcrtggtaagaagtcccttttactagaatgcattttttcatcacagcatcatggtcaatgatcaaccatgtgaacttgtgtaagttgcataaacttttcagtatcttgacgtctctgtgggaaaagatggaggccatatgtgggagaacaaaatcatgattagagacatgggagagaatagggcttcagagtgcagctccacttcagaccagtgcatggcatagtacacattgcctgaactctctgagactcagttttctctcctgctaaatggaagtgatagttggtccattttatggagccgatgtaaggactaaaagttataatgcatataatgtcctttgtctggcacacattaaaggatcaacccacttctgctaccattattattaggaacaaatacttactaagaacctaccatattcaatatcacctgagtgcattttcatattcaattctcacaatgacacaaggagatattatcctaatgttgactgtgaaaaaaattagacctggagggttcaagtcacttgcccagattcacatgggtgtgagtggcagagttggaacttaaaccaagaatttttgataccaaaacctattgatgatctttccactgaaagatactgactagatgtcaccttgctttccctgtcaaatgctaatcagagatcaatgactaatcaaatggaactaattaattctgagtcaacaaatatttatagagcccctggtatttgccgagtgccatggagatgagagctaccatggacaaaaggatggtcacccaatcctcggtggtacaggactwctgtaaatgccccaggaggtcttccctttttcccaggttgatgccttctgaatcacttctgtccattcactgctttgtcagcagcagtttacttgactgttaccttgggtaattccttgagcttatttatttactatttttgagatggagtctgrctctgttgcccaggctggggtgcaatggtgcaatcttggttcactgcaacctccacctcccgggttcaagcgattcttctgcctcagcctcctgagtatctgggattacaggcatttgccaccatgcccagctaatttttgtatttttagtagagatgaggtttcaccatgttggccaggctggtctcaaattcctgacctcaagtgatccacccacctcagccttccaaagtggtggcattacagatgtgaaccaccatgcctggcctccttgagcttcttgagagcaggcactggatctttcttctttgctactttctctgcaacacactgcctggtacatactaaatgccaaaatcttattgacaggcttgcagcgaggaatgagcatctaccttgctggttagattgcttttatccagagtggtgatccctggggagatgttttgcacttggcctcrtggcagatgggtaacaagtgctggatcccagaggaatgatgcattcaacaagtcctgagttttatctatagtgccatgcagtgagttcctcctgctcctactgccatgggccttgggatgcaccttgagcactgaccccaccttgtcatgcttcctatgtgataagtttccttctgcagccagatagctctttgactcaatattacatcagtattataaactgagtaattgtgttttccttcctccaatcaacatgttgaagtcctccttcccaatgtgatggtattaggaggtggggcctttgaaaggtaattaggattaaatgaggtaatcagggtgaaacccttatgaatagaattagtgtccttataagagtcatgagaaagcttgttttcacttctgccatgtgaggacacagagagaagatgatcctctgtgaaccaggaagagagggccttcatgaaattctagatcttggagtttttgatcttagacttctctgaccccagactataagaaataagtattttttgtttaagccaccagtttatggtatttttgttatagcagcccaaatggactaagacactcagaaaccttcctgtggcctcctggaagacctttactatcctgcaatttctccagggctgtcagaaatttagacttcagtgtggttccagaactagtgtgcagaaatataaggcaaagctcataaccatcctccagtgttcaggctcagcataagycctctaggaaaacctttgtacctttctttgggcctcccccaccatagccctcatcatgctatgattaattgctcaattatctttctctctacattgtcggttatttttagctttaattagtttgccagataaatgtatcagctacaagcccttagaggacttagaagtctggaaactttggagaaactgtttataggactggcagtttctgatggagaacataggaagtagaaagaaaatatctgggtagtctttggatattccccagtgagggtctctgagactgatatgattgagcagctttatgaataagacccaagaggaaaggctggagaaaatgagtaaaacaaagggaaattttacgtacrtttttttgcccatgagctagtcatgaaagggagaatcaaatgtgatctcatcaaagatgttcccccttgagatcataactatatatakatatatatatattttttgagacagcctctctgtcacccaggttggagtgcagtggcatgatstcggctccctgcaacctttgcctcctgggttcaagcgattcttgtgctttagcactgagtagctgggattacaggtatgagccaccacacccagcccataatcatatattcttaagtgggtgtgtgtgcataggtatgtgtgcatgtgttttgcttttcaacctaaaagcgatcatacaatatgtcaacagccttgtgtgttaagcacaacagagttcctctcattcgtaaatgaagagtctgaggcttgagacttggtttgcccaagtccagtagcattaatacaggcagccaggtcttcagatagctgcccaattcccttttcrcatctcaaatatgtgaggtcttcagacaccttggagataatatttgctctcacctctttcctcaaagaattaaatgtgacttgccatcttgagttttgttacaaaagattgtaatgctattcaatagtggtatcatatgttatttaccatggaamaagatggcaaaaactccccctgaggaactgcactaaaagtaaaagatcaagaccaagggaagagaaaatacaaatattcgaaccctatgtatctaacatgattaatatatccgagatacatatgcggctctggttaccagaagccaaagaagaaaagggaagaagattcatttatttgtccttaggaaaatagcagttccccagtcaaagaaatattttgcaagcacttagatctcagagaggtcatttaaaaggcctttagcatttattcaacaaatacttatttactagctactatgtaccaggcaccatgctaagatatgaatatacataatgaagaaacaatgtccttgtttctgtgaagccaagtctagtgagggagaaagatgttaaaattatactcttctatatattatgatatggtcagtgatatcttttggctctgcgtccccacccaaatcccaccttgaattgaaataatccccacatgtcaagggcaaggccagctggaagcaattggatcttggggcagtttcccttatgctgttcttgtgataatgagtgagtgtcacaagatctgatggtttcataagtgtctggcatttcccctgcttgcactcattttctttcctgctggcctgtgaagcagtgccttccaccataattgtaagtttcctgagacctccccagacatgtggaactgtgagtcaattaaacctcttttctttataaattacccagtytccrgtatttcttcatagcactgtgagaacagactaatacagtcagtaatggaaaagagtaagatgatgggagagaatttgaaaggatttggtttagctagaagatagctcttgttaaagtgatactatagctgagattgaaagctaactaggttttaaaaatttggagcattaagaagaatagtgttcagcaagaacagcagatgtgaaggtcccaagtcaagtacaagactgatgtattccagaaacttttaaggacagtgtgttagtgtgaatttcagaggccaaggaggagaatagtctgggatgagccctgagagtagcaggagcccagtccccttccctgcagagcyttgctaatgttggtgagatgtggtctggagagagacattaaaactactgaaggatttcaagagagaaagtggctgtcagatttgcatttaagactattgctctggctrttggaaatgatagcaagaaaagtgggtgaaaacaagagtgcaagtctggaaactagaaggaggttatggaagaggcacctttgccagagattagggtgatctggaaatacgatagaaaatagacattctaggacgggcacagtggctcacgcctgtaatcccagcactttgggagaccgaggtgggtggatcacgaggtcaggagatcgagatcatcctggctaacacggtgaaaccccgtctctactaaaaataccaaaattagccgggcgtggtggcgggcgcctgtagtcccagccacttgggaggctgaggcaggagaatggcaggtgaacccaggaggcagagcttgcagtgagccgagatcgcaccactgcattccagcctgggtgcagagcaagactccatctctaaaaaaaaaaaaaaagaaaaaagaaaagaaaatagacattctagagttaaaaactcaacaagcttgatgcaaccatcttgtttcaggggaaggcaattactgcacagagaataatcatggacaatgcccctcaaacctccacatccccaaaatcaggacatatagaaggttggagcaaaaatataaccttggctaaaataattaatartgttcttcttgattcaatttgcaggagacattcagagaaaatatccacactcaaaactgaaatatgagtgccacacagtcaytgcagctcacatctgggaattttcaccaagcaactgaaaaaaaggctattttcagttctttcatatgctctttttgtcataagttgggttcggggggtggggttcagaacccacagttgctgtggtgagagaarcaaatttgacagcttctggcagagcaaagcacaagtatttcctgcagagtttttcaaagtaaatgggtctccctccctgggcagatactggcaatccttgatgactcacttctgaggggcttagcccatcaaggattcaaagagagggagaggcctggcaccaggcccagtgctggtgacaaagtggcttcttgcctgcttttttgtagttgctccagtgggcacatctgtgcccggaatttgtcatgagacaatgagggtttgttcyctgtatccgaaatgatgacttcatgattcttttatggcagagtaagagttggagcagaggagatagaggattaatggagttaaaggagcatatyacaaagattgagtttcatattggttaagatctggaatgctttctatctggcaaactgtaaaatccaaagcattaattacattgacaataaggacccaagtgtcctcccatttagctgttttcaaaaggtattatgagtatccaagctgtcagggtgatgtgtgtagaytttttttcctttcctgtgtcaaaagcatgatgttgagcagtggcttttaacatttttgacaataacccatagtcagaagtaccttttttttttattgtgactctcaacacacacatgtagtggaaaaagtttaataaaaaataccactgcaataagtaacacacacagtttctatgatattttacttattaaattatttcctgtgtaaaaatgtgcctgtgacccagtagattgttttcatgactctctaacaggttgtgacctgcaattggaagacatagatattgaggaaagaacacaggtcttggctgttgaggctcatgacctacctccccagctgtaggagatttttctgtgctttagtatatgagtaagcatgagagaggtgatgcttcagtaatacacactcccaacatttcagtggcttaaaacaacaaaagtttatttcacactcatgctataatggaggcttgactccatatgatgcagagatccaggctgcaggagccttcacatcaaccctactttctcctcatctgctgcaagagcaattttacttctagctctgactcttttttttttttttgctgtatggagctgggcaagtcatagaaccagggctgactttatgtgcatgtgacttaggcagttgtatagggcctggtgctcagaagggccttgtggcttggcttactactctgctgtcactgccttgaaagtcttaataattttttaacaagaaggctctttttgcaccaggccacacaaattatgtaggtcatttgcatacaatcttttctaagtctccatttcctcatctgtaaaatgggttaatagagaagaactcatagcattcttaagaggactaaaagaaagagcatagtacatacacatgtagttttcaacttgctgcctttatcttcagtagtaccgctacagaaaacttttacttaatcaagttagacttctcaccttgaaaagctgtacttccttatgttgccctccctactcccttctgtttatytaaattttgttcattattcagggctctactctaacacctcctcagggtcctcttccatgactgtccaagctgttttcagaacccctaccccattaattgtggatcccttctttatgactcacttacttttgtttcctcttctcctttggacccttccttggttaggatccctcctacctcgcctggaacattaaacagcctccccattagtaacccttttagtagcccctctccagtttgccctccagttccactctccatcataccagggtcatcttcctgttaccccgaaatgtcttttctatcatgccatttcagttttcagagacttcagtggctcttctcacctaaagggcactgcccttagtcttgcatttaggatctggctctcaggccacattttgggtctcattttcctccactccactcacacactgctcctgcattcctgctctacaccatctctggaatagagcttattctcctgcctttggttctttgtacattctcttccttctactaagatggcctgccaccataggcgtggtggctcatgtctgtaatccaatcactttgggaggctgaggcaggtggatcacctgaggtcaggagttcgagaccagcctggccaatatggcgaaaccctgtctctactaaaaacacaaaaattagctcggtgtggtggctcgcgcctatagttccagctactcaggaggctgaggcaggagaatcacttggacctgggaggtggaggttgccgtgagccgagattatgccactgcactccagcccgggcaacagagggagactccatctcaaatataaataaataaataaaatggcctgccccaagatttaccccacacccctgaaataatccaatctaccttttactgcttggctgaaatcctatctcctcaaagacctcctgtgccagctcaggatgaaaagtctcccttattccttggaatccctatggcatttcttagaatctgacatatatcctgtatgtgtggggcaattcccccaacatcttggttgccttttctgctgggtctgtgttccagggaataaggacaaaaacaaaatatggctagagtttcagtcacacttcgtaggaactccctggaatgaagggttcctgcagagattgcctggggcccttcccgatcccctcagctgttctgaatcatcatcctcctctgggttctccaggaattttgtacattcttctaacatagcactgactactttccatttgagttatttcttgacatgactggatcccccacgaggcatatcttattcattattgcagttctaacagggactggtgtcaacagtgaatggatggattgattgaaggatagagactagagaggaaggaaagttgctggggaggagattccctgtatatgtaagtgtgagacaaggtgggctgtaataacaacctcttactggcacaaagcaacaaatatgtatttctcattcatattcatgtccactgtgagttggccaaaattctactccactgccttttttttttttttttttggagacagggtttgttcttttttatagcctggagcatagtgacatgatcacagctcactgcagccttgagctcccatactcaaacaatccacctcagcctcccaagtagttgggaccacaggcctgtaccaccatgcctggctacattttaagattgttttgtggagacagggtctctcactatgttgcttaggctggtctagaactcctgggctcaagtgatcctctcgcctcagcctcccaaagtattgggattacaggtgtgagccactgcgcctgtattccctcttcatcctacaaccaagcctgatggagaatccctaatctggggcatgccattcagtggcagaaggaaaggaaagatggcagagacacacaatggctctcagagcatctgtgaagaaatggctcatgtcatttcaactgacatcttgttgaccaaagcaagtcttgtggccacaggaaggataacactctcaaagggatgagcacaggagaaagaggcagtgagtattttgacaaggacacaatcttctacagtgggggcagagcttcatgtggaattccactcacataatgctctttgtctgtckgcatacccacactcgttctgaccagggaagaaggagggggccatctacttggtgattccaggagctggatgtgcagggcgttgcatctgtctctcctcttgctattgagcataagctgcctctagcgggcatgctttctaccttgccctctcagggattgagggatagactctctggatatatggttgtctacaacttggtaggtaggtctgtctaatcctggagctccatttattcatccgcagagccatatcctccaatttgagatctacaagtaacaacggtggttttgattcccgccattgcctttactcctctgccttaattttcaattggtttcaagcttggaaaagaaagagagttcaattttttgatctctctctcatatctccataacagactttgcagaaatatcaggtcaggtcctgttactgatgtgttcattctcatgggcaggaagagacacttcagtgttgctgctgccasgattgtttcacttaaaggaactctctagctgtcagagaaagagtgatactctgaaaatagtctctaacatgctgcttcctgctctaggatcatcttatagaaaagacactatgttcatcctgagccaacctggtccctttatagtcagatactagagaacaatgagaaatggacatgggggatatctttagcgaacatccttagtgaggatctgtctcttcttttcctgttgggcatgagctgcttctagagagcatgctttctacattgccacccaccccaccccaccctgagggatccaggaatagactctccaaatccagggatgtgtacaacttggtaggtaggttgggtagggagagtgttttgcacaagctagagctggggttcatatgtgtctggcaagtggagttaatggtactgttttctatcaagtgtccagttgcataagttgttatacaaagacggtgctttagcttttaactggaggaagagggggacatactgayatgtgggacagagggtagagaargaagaggtaaaattgagagggaataacgtgattaatttccactcagcctggcccgatgagagactgtgagggtgctatmtaaagcttaaggaatcatgtttatgaaaaaactrtaagattttgggaagcagcagcgctctttggagattggcaacaaatatgacaatttactcaaaagatttttatttctggtggttctagactgagtgacagcattggacaaagatgtgtggagcaggatggtagctggaggagtgccagagagagacccgggmtctcaccaaggttacagtgyctgtggctttgcgaagattcctcctaaaattctgctcatggaaggatttcaaagaaagactgagtgaacttgttcctgagaatgcttgaagggacrgggaaacattaaaaaataaagactgggttattggaaattgatggtggtgttggtgggggttgttaagaactaccgttatttacacactgatgaacttgtgacctcatctatattcacaggctgctggtctctgagctattgagtccacctacttatagggatgttctttatattggggtgaatgttttgcttgtgatatatcactctgtattagtttcctattgctgatttaacaaattagcacaaacttagtgacctcaaacacacacacacatacacacaaactcacacacacatttattatcttacaattctggcagtcagaagtcctaagtcagcctcacgggctaaaattaaggtgtcagcaagctatgttccttttggaggctctagaggagagtttttttgcttgtttgtttgtttgtttgttttacgttttctagattctgtgactgcctgctgtccttggctcatggccttttcctcattatcaaagacgacagtacagtatctttcagcctttctcctaactctgatcctcttgactccatttcataaaagccatttatctcaatatcttcatctcaatatccttaacttaatcacatctgcaaaggtttttttttttttttttttttttttttttttttaacatataaggtaacgtctcccggggagcattattcagcctgctatattctccaaatagttttcattggctttggtttcatcttatcaagaggagatcaattcaacctttactttgtacccattgagtgccttttgtctgctagaaatttttcaggctttatttcaatcaacccccactgtgattctgcgaagtaggtatttatgtgcattctatgaatgaggaaacagggttgcatgcaaattgatctggcttaaaaactcactctttctttacaactttaaatatttcatctccagaactactatattgtcatgattgaaatgactggatgagaaatactcagaaatttcaagtccctgctcccctggtggctacagaagtacagttgagaggcctttcagtatttcttaatagacagccaccttccctctgcctggagtagatgagattcctgactcctgtctttcttctgagactctgcccaggataccctagttttgcggaactgacacacccaaatgtcctgaatgagtcataaactcttcccgaagctaacatgtgatgaggagggaaggctctttctgccacagcctgtgaaatggtttccattacagtgtttctgctgagagcagcaattctgtctttatcctctttcccatgactacagagcctccaacatctgactgagttgacagaagagtgagggggacactggaraaagtcccaggctggaggccaggggacctggaggccgatattgtcattgcctctgactagtcctatgctcttgagcaagctgctccagtgtctgagtctctggtctcatttggactaaaagtcttggtccttctttgtgcttacaatttaaaggatccctgcatagccaaacggtaccattcttaatggcatgaacaatatcagaaagactttagataacattcatttggagataactttgccatgtgcttcactccctctcaaccggcaatatggcagagtggttaagagtgtagaatctgcattaaaattccagttctgccttttttgactggtttatcttgggcaagccgcttagcccctgtgtcttatattcttcatctatccaatggggataatgataaagatgatgttctcccccgagggttttgatgactgctagttagaccagcactgaccactgttcrgtccaatgaaagtacttgtctcatgccctgctattcattcttcctcaatctcccgtagagaaagagacttcagctttaaactcagagtctttataataggccatcagctgtgtgaccttaggcaactcaattcaactctctgatcttcaggatttttcaactttaaaataaggataacaataagagcaacttcatggtgaagggggataaggattaataaaacaacacatgtaatatttctaggagaatgcctggcatatggaaaatgtttgctccctttagatgttatcctcgtcttgtgtgaatcttaaaatttctagcctgcttcagatttaattccattttctttctaagatgtgagaaaacataatttgatatttcaggccaagttaagcttttttattgagctcacacagttgtaaatatgtacattaaagtatgtcctcatgaagaacaaagggcatggatttttccagcaccctccatcccccaactcacagcctcaacatccgcaaataattaatgcatagaggaagtttacggttggccacccaaatgcatctcaaacattaaatttaaaaaactaaaaggatgaacccagaraactgctataaacttcaaagaatctattaaggacttagacatatggtgttaaaagatatgtccaagatttatggcactgggcctacaaaaaagaattctggataggcttctgctatgtgaaatatcaggaaagggtcagcagaggtgagctctgtgtccccaactgcctggagtgacctcacgagcagaatcagatagcagtggacttagctcagttcttggctcctccagatgcaagccaaacttcaatgcttagggcagcgagaatgtactggacagagagccgctaaagataggagaagatagatcagatatgttttgcatttaggtcctttcttttttttttctacctggaacacaggcagtgataattatggccactaaccatattgagcaattgagcaattgcaatgtgttagatggttttacattgaatttaatttatacctcataacaaactgtaaagaatgtactaccgttttcttcttctagaggggaagaaactgaggctcaacaagtttaagaaagttkctgggagacatatagcacacaaacataaaaccagaatttgaatacacatctatttcatgatggactacttttgtggaactgttaaaggaaacaagtaatggccgaaatgaatggtttagtcattgatctgcttgaaggctgagcagcagatcaaatggcctcttggacacccaagattttgggagtctaagactctgcctttctgaattgcataccttatatgtctacatgagtccttccaaataagctgctcagcacccctggtccatagatcctttgtaattattgcctcctctcaaaagcacaacattgattttatccacctggaagttactgtctgcctgcttttagatagagagcaaatctcctctttgaacaaattcatacaaaactctcactatagtcgggacccaggatatgttttaaaattgattagaagtgttccttgagcttttatttcccttctgtttgtggaggaaggaacagaaatatttccaacttaccttatacaataatgactgttacaggtatgacctcagacccagagtttggggatggaattttctgcctttgatcttggtttgtactgtctctaagatgtgacatctcttctacactgttgccacccagcatccatctgtcatattccaaactgccaatgtgtgtcacccaaaacattagatgacctagttrttctccctgcctagagccttgcctcctctaattcacttcatttaaaaagaaagacatttatcttataaaagaatacaagcatacggaaaagtacctaataatatagtaaataactgtattgcctactgttagcaacttttaaattacatatagatgcatcaataaaggcaatatatagtattgttgtaaacacatttaaacctggtttaaattttatcacattacacaaaccattaagtgagtttctttttaaaaactcaacatcatgttttaagaattagctctgttaatatatgtagatagtttattcatttttaactgctctatggagtacctttgtgtgaatattccacaattgaattaatccactctcttactggtatgcattatttgttgttataaacaacactgcaataagcatccttgtacacatttctttgtgcatatttgcacaagtaactgtggagtacatacctagatatagaatttccagacacataatattgtcatatttatatttactaaagaatatcaaatttactttctcaacagcgttgaatgagtttccattgccctacattcttaccaataattggtattgtcagatatttgacaatcttatgggtttgacaaagggtttcgtttcctaactttgtgtttgttagtgaggaaaattaattcacatttatttattagattttaattcaaatttattagtgagaataattatcttttgtatgcatattggctactgggattttctctctcgtgatttgcctgtttgtgtcattgtgattttttttgtcttgaatttttaatatttaatctgttgatttgtagaaatttttatccctgcatggtatgtgtactaattttgacacaaaacttgcaaataacttcttcaagtctgtggtttattgtttacatctttttggagatatatttatcatttacaagatttttagytttaccatagtcaaatttataaaattttgaatgtttttatggtttgagctttsatgtctgactcaataaatccttgcttctgacagtcaagaagttatttttcatttatttatcatttatttcatctatttatcattttataagttttaaagttttactttttgtattgtgatcctcagtgtatctggaatttattttgatctaaggcagtcttctaattttgttttgtttccatatggaaacccaattgcctttgtaccaattattgaatagtctaacatttctctatttttttatagcagcatctctgataatgccaattttttcattcatgtccctgtgaagagaccaccaaacaggctttgtgtgagcaataaagctgtttatttcacctgggtgcaggtggcctgagtctgaaaagagagtcagtgaagggaaataagggtggggccgttttataggatttgggtagataaaggaaaattacagtcaaaggggggttgttctctggtgggcagagtgggggtcacaaggtgctcagtaggggagcttttgagccaggatgagccaggagaaggaatttcacaagacaatgtcatcagttaaggcaggaacaggccattttcacttcttttgtggtagaatgtcatcagttaaggcaggaaccagccatctggatgtgtacatgaaggtcacaggggatatgatggcttagcttgggctcagaggcctgacattcctgtcttcttatattaataagacaaataaaatgaaatagtggtaaagtgttgagatggtgaaaatttttgggggtggtatggagagataatgggcgatgtttctcagggctgcttcgagcgggattaggggcggcgcgggaacctagagtgggagagattcagctgaaggaagattttgtggtaaggggtgatattgtggggttgttagaagaaacatttgtcctgtagaattattggtgatggcctggatatggttttgtatgaattgaaaaactaaatggaataagagaaggagaaaaacaggtataaaaggtctaagaattgggaggacctaggacatctgattagagagtgcttaaggagattcagcatagtcctgccagcaaagattatttatttacttcaagagtttagagtggcagtttggggatagcactaggagatatcagctgtgatggcttggagaaacagtgtaaactggcagtgtaaacaagagcagggcatgtatgagtagttgagaacagtgaataggaatgactagacagaagatagtagggatgacaagttttttggggcacagtccaagttggtctggtgtctggaatgagactggggcctaataaaaatgagcgtctatacaggagctyaaatgggmtgtaccytgtagcattctgaggacaggcctgaattctgagaagggaaagtggtaaaagtattatctagtcctttttaagttggtggctgagcttggtgaggtgtgttttaaaagactattagtccgttctacttttcctgaagactgaggactgtaagggatataaaggtttcactggatattaagagcctgaaaaaatgcttggctgatttgactaacaaaggccagtcttctatcggactgtgtagaagtgggaaggccaaactgaggaattatgtctgacagcagggaagaaatgaccgtggtggccttcttacaccttgtgggaaaggcctctacctatctagtgaaagtgtgtacctagaccaagaggtattttagtttcctgactcagggcatgttgagtaaagtcaatttgctagtcctgggcaggggcaaacccttgagtttgatgtgtagggaagggagggggcctgaataatccttgagaagtagtagaatagcagatggagcactgagaagttatttctttgaggatagatttccacgatggaaaggaaatcagaggttctaagaggcgggctagtggcttgtactatagcatagcctgcctttgctggtgtgtggtgattaggcctggtggaactgccatcaataaactaagtgtgatcagggtgaggcacaggaaagaaggaaatatggggaaatggggtgaatgtcaggtggatcagagggatacagtcatgggggtcaggtgtggtatcaggtataatgtgggaggccagattgaagtccgggccaggaacaatgataattgtgggacttaacaaagagtgagtacagctgaaggatccggggagcagaaagtatatgtatcagctatgaggaagaaaatagattttggaagttatgagaaatgtagagagtgagttgagcatagtttgtgattttgagggcctctaaaagtattagggcagcagcagccgctgcacggagacatgatggctaggctaaaacagtaaggtcaagttgtttggacagaaaggctacagggtgcggtcctggctcttgtgtaagaattctgaccgcactaaccwtgcytaggaaggaaaggagttgttgttttataagggattgaggtttgggagattaattggcacaatcagcagggagagcacgtgtgtttttakgagaattatgccgagataggtaacagatgaggatgaaatttgggcttgactgaagtaatgggggctgtctgtgaagccttgtggcagtacagcctaggtaatttgctgagcctaatgggtgtcagggtcagcctaagtgaaagcaaagagaggctgggatgaagggtgcaaaggaatagtaaagaaagcatgtttgagatctagaacagaataatgggttgtagagggaggtattgaggataagagagtatatgggtttggcaccatggggtggataggcaaaacaatttggttgataaggcacagattctgaactaacctgtaagccttgtctggttttaggacaggtaaaatgggggaatggcaagaagagtttataggctttaaaaggccatgctgtaacaggtaagtgataacaggctttaatcttttcaaagcatgctgtgggatgggatattgggattgagcggggtaagagtgattaggttttaatgggatggtaaggggtgcatgatcggtcactaaggagggagtagaggtgtcttatacttgtgggttaaggtggggagatataaggggaggatgtgaaggaggctttgaactgggagaaaaggcagcaatgaggtgtggctgtagcctaggaatagtcagggaagcagataatttagttaaagtgtctcggcctaataagggaactgggcaggtggggataactaaaaaggagtgcttaaaagagtattgtctaagttggcactagatttggggagttttaagaggtttagaagcctggctgtcaatacgcacaacagttatggaagcaagggaaacaggcctttgaaaataaggtaatgtggagtgagtagcttccgtattgattaagaaggggacggacttaccttctactgtgagagttacttagagcatctgtgatggtcctgtaggcttctgaggcgatcaggcagtgtcagtcttcagctgctaagctgagaagatctgggaaggagtcagtcagagagccttgggccacagttccaggggctctggaagtggctgccaggtgagttgaacagtctaattttcagtggggtcctgcacagatgggacatggcttaggaggaatcttgggctgtgggccttccttggcctagtggctagatttccggcacttgtagcaagctcctgggggaggaggttctggaggaacccctggcagctgtggttcaggtatttggagttcttgttgtgctggagatgtggctggggtttgtctcaccgtggaggcaaataattgcaacttagaaatacgttgctacttggctgcctctactctattattgtacaccttgaaggtgaggttaattaagtcctgttgtggggtttgagggccagaatttaatttttggagttttatttaatgtcgggagcagattgggtaataaaatgtatattgagaataagacggccttttgaccttttagggtctagggctgtaaagcgtctcagggttgctgccgaataagccatgaactgggctgggtttttcatatttgatgaaacagcctaaatgctcactgatttgggagaggtctgataaagaaaaaggagcattaactttgactatgcctttagctttagccacctttttaagaggaaattgctgggcaggtaggggagggctactcacggaattaaactgtaaactggaccgggtgtgaggagaggaggtgataaaaagattacagggtggaggastggaggctggggaagaattgggacctagcttggcctggcgaggagcagcctggggaggaggggagaggtcagatgggtctgtagaaaaggaagattagaaagactcagcgacgcttggggttgggacagaggggacaggcrggagggaaagaaggaagatttgggatgagttgcactgggcacagagactaggaagggactgatgtgtaaaagaatgcctggacgtcaggcacctcagaccgtttgcctattttaccacaagaattctttagatcttgcaggatggaaaaattgaaagtgccgttttctggctatttggaactactgtgagtttgtattggggtcaagcagcattgcagaagaaaataagaygcttagattttaggtcaggtgagagctgaataggttttaagttcttaagaacacaggctaagggagaaggaggaggaatggagggtggaagtttgcctatagtgaaggaggcaagcctagaaaaaagagagagtagagacacagagggaaggggtttgggagttcttaccttccagaaaagcagaaaaggggtcaaggcacagaaataaggggttggggcacggagataagaggtcggggtgtggaaataagggatgrgggcacagagataagaggtcgggstacttgcccctcctttagaaaagcgggacttgccgctaagggtgaaagagaaggggttgaggggttcttgcctctccttcagaaaagcagagaaggggtagagacayggagagaaggggttggggtacttgcccctccccaagaaaagcaggacttgctgctaagggtgaaggaccaaggcaggcatccttgcatggtatgacacctctgaaacatgagtgaataatcagaggtgtccctgcaatgattaaacaccaagggaaggctgccttcccagtctgtgacaggcgctggagttttgggtccacggataaaatgtctcctttgtctctaccagaaaatgaaaggaattgaaattaagagaagggagaggttgaagtgtggcgccaagattgaaaggagaacgaggttgagggatagtgagggaggttgaagaagagagtaaaaataggctgcttactggatttgaaattggtgagatgtttcttgggctggtcggtctgaggacctgaggtcataggtggacctttctcatggagcaaagagcaggaggacaggggattgatctcccaagggaggtaccctgatccgagtcatggcaccaaatttcacttgcatccatggaagagaccaccaaacaggctttgtgtgagcaataaagctgtttatttcacctgggtgcagctgggctgagtccraaaagagggtcagccaagggagataagggtggggacgttttataggatttgggtaaataaaggaaaattacagtcaaagcggggttgttctctggtggccagagtgggggtcacaagatactcagtaggggagctttccagccaggatgagccaggagaaggaatttcacaagacaatgtcatcagttaaggcaggaacaggccattttcacttcttttgtggtggaatgtcatcatttaaggcaggaaccaaccatctggatgtgtacatgaaagtcacagtggatatgatggcttagcttgggctcagaggcctgacaaattttccatggatttgtttcaaggtgcttgactgtattgtattgatctgtttgtctcttctttatataaataacattgtgttacatacagtgttagaataacgcttgtatgtggtcttgtatgctttattcccttccttcaaagctttatttctttattctttcttatgaagagtataaatactggctggtccattttaatgaaaaccttattataattaactaaaattgcaacaaatatgtagattattttggtggcagaacaggaacctctttaataataagtcttctgttccataaatgtttattcaggctttcttctatgtctttaaagagattcttaaaattttcttctaaaagtttatttatttttttgctagaattattcataggagcctgaagtttttcttgctattgtaaaagtatcttcaatttccattacactttataattggtatggctgaattctagaatgaaaataaatttgygttgatctaataacttgctgaattctgttatcttttgtaatattttatccgtatttttttaagagtttctaatcatattgtttgcaagtgaatgtcattgtatctctttttatctatttaaaaaatattgtgtttatttttcttattgcattggccagggcttatgtacaattttgaatggtaggagtgatagcgggcatttttggctttttccagattttcaagggaatgtttctaatgttccatcattatagaggccacatagcacactggttaaaaatgcaagatcaaggaggtttgaatttaggctctgtcasttaaaagttgtgtgatttgggccagataacttaacccctctgtgttcrtgtttttccattagtgaaatgaaaataaacaaaagcaacaacaacaataatatttatatcagaagaatgttgtgaggattaaacatatatgtgtgtatatatacacatacatatattaatatatgtatgtatgtatgcatatatatttktgtacttagaacagtgcctagtacaaatttaatgctcaataagtatttaataatgataaaaagtgatatttactgaatactttttgtaaagattccttataygtttgaggaaatttcttcatattcctacttttcctaaagttgtctttatagttgagagttaaattgtatcaaatgcttcttcttcacctaataagataaatgatatgcttttttgttagtgttctaaaatggtggttaattttaacagattttctgccactgaactatatttgcattcttgggctatcattcattgttactgttgatgttattggtacactatatatttgaaattattattttgctttccatttataagtgagattgggcttttttttatttttgtactgcctttttacattttgaacaagaaaaggattgtttgtyctttggtgattagtaaaatgtgactgtatgaatttatctgggtattgtttctttttggtatgaaaactgcttatcaattaaaattatctgatatctaattttgtgtaggatttttgtttgtattgatgtcaatattgattgtttctatggtttccataaagtattttatttatgctacattttcaartttgcatatttggaaaagctatgaaatctacaaattgaaaaatctacaaaaaatagcatgaaagttggtttaatttataatgatttaaaaaattctctactatagccctaattgtggtcccactttgttactatagtttaatttgtgatctctttttttttttgkttttgtttaataatctcttttgcttctttgttttcttgtacattaatatcagttgtttacctgtttctgtcagaggcatttgaaccagaacgactccatcttgagtaggggctggtaaaataaggctgagatctgctgagctgcattcccagtaaattaggcattcaaagtcacaggatgtgttaggaagtctgcacaagatactggtcataaagaccttgctggtaaaacagtttgcagtaaagaagccggccaaaattaccaaaaccaagatggtgagagtgacctctggttgttgttatggctcattgtaagctaattgtaatgcactagcatgstagaaggcactctcaggagcagcatgacagttttcaaatgccatggcaatgtcaggaagctaccctataaggtctgaaaagggaaggagccctcagctcctagaattccccagctctttccaggaaaactcatgaataataacccttgttaagcatataatcaagaaataaccataaaaatgggcaaccagtggctgatgccactgctctgcctgtggagtaaccattcttttatttctttactttctcaatacatttgctttcactttatggacttaccttgaattctttcttgagcaagatccaggaaccctctttcggggtctggatcgggatccctttccagtaacatttcccattcttttaatttttattgttttattacctttactttcttgagttgaatgctgaacttattttcaatcttgctttttttwaaaaaaaaaactaataaatgttttttaaggaatacattttctcctgttgacaaaaagcatcaaactccgtaaaatatttgaagagatttattctgaaccaaatatgtgtgaccaatggccagtgatatagccctcaggagatcctgagaacatgtgcccaaaatgatgggctacagcttggttttatacattttagggtgacaggagacatcaattaatacatgtgaggtgtacgctggtttggtccagaaaggyccagacaaccggaagtggargcttccaagtcctaggcagattcaaagatattctgattggcaattgactgaaagggttattatcaataggaaggaaagtctgtgttgtggtaataaggggttgtggagaccaaggttttatcagacagatgaagcctccaggtagcagccttcagagagaatagattgtaaatgttgcttgtcagacttaaagagtctgctctatcagtaattccaaaagggaggagggtataatgaggcgtgtctggctcccctttcccattatgaattgaaactagtttttcaggctaactttagaatgtccttggcccagaagggtccatttagatggttggggaggtggggtgggccttagaattgtaaaccaaaaataaaattctaaggcccctcccaaccaactaaatggacttcctttttagtcagggttcttaaaatttaacctgaaagactggtttaggccatgaaaggaagtgggggtcagacatgcctcattaatacctctctggcattaacaacaacacagacttcaagtctgataagaaacattttacagcctgttctctctgaagcctgctagctaaaagcttcatctgcatgataaaattttggtctccacaacctcttattgcaacccaaacatttctttctattaatcccaggtcttaagacaaactcaaccaattgtcaactgtcagccagaaaatgtttaaatttacctatagcytggaacctacccccctccccaacagccccctgctttgagttraccaaaccaaatatttcttaaatgtgcttgattgatgtctcatgactccctaaaatgtataaaaccaagctgcaccccaaccaccttgggcacatgttgtcaggacttcctgaggctgtgtcacaggtgtgcattgcatccttaaccttggcaaaataaactttctaaataaactgggacctgtcttacatgttctgggtctagagatttttatttttggtttacactgggtctacagaattttatttttagtttacacttctaataaactttagaagtttttttggcaactcagaacttttgatatttaggagtttacttttacttttccaaatatatattttaaaatctatatcttttattgttgattttgcatttaactgtttgtagttcagaaggacgttggcataatttcctattgtaacgagtggcaataaaagcaacataaaggaattatgttctctaaatatatcatgtgatgtataataaatagtatattaaaaacccataattaaatccaatttctctggtcttctcatgtcacattagtcacgtttacaaaggcaaaatcttaaagtattagcatttgcttgccctttggtgttcttaaacagcagagcccccaaacaaaagcctatccagtgaagactcttattttgctaaacatccaagcacttcattttctgagtgagagatgatttatccgctccacaacatcagtcatttgaacctcagtgcacagtgtgtgaaccagtggcacttttaaagaataactttgaagaataacacacatgcaaaaaagtgcacagatatgtctatagctcaaagaattttctggaagtaagcacactatgtggcctgcttacaaatgaagaaacagaatataaacagccctctcatgcttcttccagtgataactccaccatcacctrgggtaacctctaccttgagttatagcaacacatatgcactcttcctgttattgaactagatgctcttttgtgtctgtcttctttggctcatcattatgtttatggaattcaccaatattattgcattgttatgtagtattgccttgtaagaatataccacaatttatccattctccctttggtggacagtggaccaggtttccagttttgggttattatggataatgctactacaaatattgttgttatatttttggatgaatatgtgtatgcgtttttggggggttgtatacatctataagtggaattgctgggtcatgggatatgcatatgtatgtttaattttagtagatatgtgyaaaaagtattccaaagtggttaaattgatacaatttattgaaagttctggttgttctgtgtctttgtcaacactttgtattttctgtcttcagttttattctgtacttyagtaggtatgcagtgatattgcattggtatttgatattggaagttayctaatgactgatgaggttgagcattctttcctgtgctattgatcatttgtgactcagtgttttgaagaaatttttagtcttttcttcatttttctattgtgggtgtcactgactcaggccagtgtgttggatggtaaaagaatgtaccaagacacttgtggggaaagaaaggcagatttattaaagaaaatacaaagatatattgcaaggtgcaatgggcagcacagcagagaaggggctgtctgcaaagatgyaggcactgcagggaagttttatagggccatagtggagggggctatgtgtggaacgagataattgggaagaggatgttgtgccaaggagttgtctgtgattagccatctctcagaaaaatgattctcccccaccctgggagccctttttcattgttgctgacttaccaggactccatattttctatgggtttatcatttcttcttgatgtgtataaatcttttacatatttttttgatacatatcttctgtcagatacaagtattgtaaatttttcatcctaaatctcgttttcagtttttaatttttttagtaaacagatgctcttaaacataatatagtctaatttatcatattattattattttatagctgttatttttaatgtcatctttaagatgtttttgcctactgcaggttactgaatatgttgtcttttgtcctacaaattttatcattttgcaggtacaaaatatgtttatcttaatctaactggaattgatacttgtgtatggtgtcttatggggtcaagatctattttttttctctgtattttattttacttttgccatgtggatatttagttgtcacagcaccatttattaataaggcattctttctttttctgcactatcatctcacctaattttaccaccaatctggtaaccactattctacttactattaggttggtgcaagtgtaattacttctaatggcaaaaacatacagtaggcaaaaatatcttaaagataacattaaaagtaacaactacaacaattataacattaaaagtaatgacaaaaactgcaattacatttgcaccaacctaatacctccatgagatcaattttttttagcttccatatgtgagtgagaacatgccatakttgtctttctgtgcctggcttacttattttacttaacataatatcctccagttccatccatgttgctgcaaatggcaggattttattctttttatggctgaataatattccattgcgcatatatatatatatatatatatatatatatcacattttctttatcccttcattctgtttctgtatgtattttttattttttaatttttgtgggtaaatagtaggtatatatatttatggggtgcttgaaacattttgatataggcatgaaatgtgaaataagcacagcatggagaatgaggtatctgtctcctcaaggatttatcctttgaattacaaacaaaccaattatactctttaagttatttaaaaatatatggttaagttattattgactatagttatcctattgtgttattaaaaaatgtcttatacattcttctattttatttttgcacacattaaccatccccacctcccccactgtayttcttaatgcttctttttattttttttttaaattttgagacagagtttccctcttgtcactcaggctggagtgcaatgrtgcgatctcagctcactgcagcttctgcttcctgggttcaagtgattcccctgcctccacctcctgagtggcygggattacaagtgcataccaccacgcccggctaatttttttttttaagtaaagatggggttttgccatgttggccaggctggtcttgaactccagacctcgggcaatccacctccttggcctcccacactgctgggattataggtgtgagccactgcgcctggccaatgtttcatttttaaaattatcttaattactatggctttagaatagattatgtaaatgctctttttcaaacagaaagtatccgtatgtatttcagaataagcggaagcattacatttgaatcacattttctttatgcaagtgagagaattattggaatgcttaggcagtgttataacctgggaacaagaaactagtttaaagtaatcaaattgtcagtgactaagaagtcaaaagtcagtgaaaaacatgcacatgcactaacgtgttagaagtgcccattttgaaaatcaaacgtgtgactgactattcgatcatcaatataagataatactcagttgacgttttaaatattttatctttgcttatggaattttttttactgaatttttaaaaactcagcctcatcgataactttcaataactatgtttgattcattacacttattgtgttttattgatgtatttggaaattctactttgggggctgtgtgtgtgttctccatcttacagattttagagagattgtcaaattttttcatatcccattgttccctaaaatgatttaaaagacctcaattgtagtttcatttgttttaggacacagtcttagattttaacatacatacttatctattatatttgttaataaagtcttaggttagtggatatttctatactctttctgaaaatgacatgcatcttacaaccagttggacttttaagayagtctaggccaggtgtcagttgtgatacagcagtcatatctcaagtaatgcccagtttttgagtgcttctttttttttttttttttttttgagatgaagtcttgttctgttgcccaggctggagtgcagtggcatgatctcggctcactgcaacctctgcctcccgggttcaagccgttcttttgcctcagcttcccaagtagctgggacttcaggcacctgccaccacgactggctaatttttttttttttttttgkatttttagtggagacgggggtttcaccatgttggccaggctggtatcgaacacttgaccttgtgatctgccagcctcaacctcccaaagtgctgggattacaggcgtgagccactgcacctggccttgagtgctccttatctccataatcatgtttctgctggttagaattttagaaaagtagtctttttgtcttttcggttgagtgatttatctaccaatttttatcattttatgtgctcattattgtattctacatctcagtcactacttttttattcttcagaatttctgaactctgctatgtgtctaaaatatgttttatgttttgtgtccttcaaagtgcatgtgttggaaacttaatccccaatgcaatcatactgggaggtggggctgatggcaggtgtttaggtcgtgaaggcaccactctcatgaatggattaatgctgattgctaaagagcttgargctacaagttcgatctcttgttctgtcttgcccttccacctttatcgtggaataatacagcaagaaggctcttgctaggtgctgacttttcaatcttggacttccaaacttccagaaccatgggccaataagtttatattcgttataaattactcaggctgtgggtgttctgttatagcagcacaaaatggacaaagacaatgtctaagtgtgggtttagttttcttttttctgatcactaattaatgttcattttctttttcttttttttttgttttgttcattcagagtcttgctctgttgcccaggctagagtgcagtggaaagctatctcagttcactgcaacctgcgcctcctggattcaagcgattcttgtatctcagactcccaagtatctgggattacaggtgtgtgccaccacacccagctaattttccctatttttagtagagacagagttttgccatgttgctcaggctggtcttgaactcctgagctcaggtgctccacctgcctcggcctcccaaaatactaggattacaggtgtgagccactgtacccagcccaatgttcattttcaatcaggtgaccgccattctactcactactttaatgagatcattttttttagctctcacatgtgagtgagaacatgtgatatttgtctttctgtgcctggattacttatttcacttaacataaagtcctccagttccatccatgttgctgcaaatggcaggattttattctttttatggctaaataatattccattgtgcatatataccacattttctttatccattcatccactgatggacacttaggttattttcatatcttggctattatggatagtgcttcaatgaacatgggagtacagatgtctctttgatatactgattttctttcttttcatatatacccagcagtggaattgttggattatgtggtagttctatttttaagtttttgaggaacctctaaactgtttttttttaccctaatttacatttccaccatcggcktttgagcattcctatttctctacatccttgccagcatctgttattttctgtctttttgatagtagccattttaactgaggtaagatgatctcattgtggttttgatttgcatttccctgatgattagtgatgttgagcattttttcatatagaggttggccatttgtatgttttcttttgagaaataactacagatcttttgcttatttataattggattataaagggtttgtttttgctattcaattatttgagtttctatattctggctattaatccatcagagagatagtttgcaaatattttctcccattccataggttgtctctttactttgttgattgttttctttgctgtgcagaagctttcacttgctacaatcgcatttgttaattttttcttttcaaacccacagctaatacaatactaaattaaaaagaaaaattgaaggcttttctcataagatctagaacaagaaaaggatgattatttttatcacttttatgcaacatagtactagaagtcccatctggagcaattagataagagaaataaataaaagctatccaatttgaaaaggaaaaaaggcaaattgcccttgtttgcagatgacattatctaatattcagaaaaacttaagactccaccaaagaactgttgtaactcaaaagcaaatttagtaaagttgcaggatagaaaatcaacatacaaaaatcagtagcagtagcatttctatataccaacagcaaacaatctgaaaaaaaaaaaaaaaatcaaggaagcaattttatacctaagtataaaaataaaatacgtaggaaaaaatatagctaaagaagtgaagatttctacaatgaaaactataaaacatttacaaaataaattgaagaggacacaaagaaaatggaaaagtatttcatgtttatgaataagaagaattaatattgttaaaatgttcacacttttaartgataaacagattcaatgcagcctctatcaaaatatcaatgacagaaatagaaaaaacaatcttaaatctcatttggagccagaagaccctggatagtcaatacaatcctgaatgacaagaacaaagctggaggcatcactgtacctgacttcaaaatatactgcaaaactatagtaatcaaaacagcatggtactggcataaaaacagataccaatggaacaaaatatagagatccctggaataaacccatgcatttacaggcaattcatttttgacaaaggagccacaaacatacactgggggaaaggacaacctcttcaataaagggtgataggaaaactgaatatccatatgcagacgaatgaaactagaattattgaaactctctcaccatataaaaatcaactcaaaaagaatgaaagacttaaatgtaagacctgaaactataaaatgactmgaagraaacactggagaaatactcgggacatttgtctgggcatakaattttttgagtaagacctcaaaagcacaggcaattattttactcattttggttcacaatttcctgttttttatgatctctgaaaattgcagccctacctactaaaaatcttttattagattagaaatttgtttttgtttgtagttgatttattgttgattattagttgattatagttgattattgtttttatcttgatttttatgattgtgatctattttttatgtttattggrttttggttttgctgtttggatgttgggctttcattttcaggatagctctatcacatatttcrtaattttgttttgtagaattatcttawattgaaggaatgttgttttgtgctaatacattttctctttctttagagcatatgtgatgttttcgtccaatggcccctggatctgctatccacarttgtgttttatgtcaactgtttgagattccttctccatggacataatgaggctgttttgataccattactcaagggagcatatagcttggttcagcttgacttttgactgcaaggctgggtttgcatatactgccttttttgtcaggtggctgtagccctagacagcctcttattaacgggggatttccagtctcgcttattaacaggggatctcaatctccctcttaatcctcagcagggagcctgactgcagtctacagcttcagcttcatgttggctgaactttttctctgttcttcccatagaagtagaaaacctggatgcctcttcctgtgtggactaggagcccagaagcctgtagcttcagcccattttaccttttacttattctatttctcatccacagagatgttgcatatttgaagccagctatgcatttgaatgttctctttggaactgttatccgttatcattgtgagtttggagcaatgccacttgcctggatttcttcctttgtttcctacctggcaaacctaatggtattccctaaactccaaatatctgcacatcatttccctgtttataacatttcattctatcccaattgaacttcgaacaagtgtaaatgcattaccagacctttgaagacctttaatcacagggcctttgctcctatttatatgaagctgctttcagtttcccgaatgcattgcacttccttcaaccacaaggccttcacatgggctctttctccatctgataaactctcacttctctgtcttgtttgtacttagtcttcctgatctttctcatctccatttaatgtcacttccttcccttttcttcactccacggactttccttcctccactcccacttcccatgtgataacacttgtcccatttccttgtaaccactttttaatcactctttcctcatagactgaagctttttgtgaatagagaacatgtcttgctcattcaattcttaatcactgcacctagcatatcatagacacccagtaaatattacagaataaataaattaatgaagaggcaatttactccttcatcttagttcttccttgctgtccagacatagtcctgacttrcatgtgacatgggggaacaaactgttctatctgtaccaccagttaactaaggagtccttcaggctcagctatgaattccatcaggaaaattctgagctttttggagtaatggagggagaggtgatgggattctgttgtggaactgagagggtccagtggaagtgagtcagaatgttcagtgttctgcaacaaagacttcccttcactaccccttcaagcatcacacagactctccaggtctggggtggcttgtggtcccatgtggttattacatgcacctctacgtactgaatttgttgatccttgcagactagcagtgcaagagctgatctgaactcaggggccctggagaagcaaagtcactcctccccattctgaagcagctgtggttccttacatttggacacaggcytgagaccwtggctacagtgagctagtgctggggaatctacttattgatcaccggagcagctgctaagcctggctttcaagaacatccctcagagggtgctttcactgtgccaaaatctttcattcattttcctctaccattttaacatgcaatttagttaaaacactttcctttcatgtgtgtgccaagatggtgacttcataaaggtcaggaaatgaggaagcaagaacttccttgaaagatttaaaataaattatttttagtaataataaatgacaaattgggagatttaagacaaagattcctggtagttgaatgcgctgaaatctatgatgtttgrggattgttaacaatcttcttccaggatttgatcggttttgtacttgtattttctcaatctactattctttayttgctctccttcctttagaatggacaaatttttgtaaacttttaagttttctctttccttgaggtagtaaattggagttgagctacacaggttcctctttcctgatatcccctttctgctatttgatgtgagatggctcttgaggctaaaagtgcagtgagggaaagagagtcacattagcagagctatccagaatatcctctggttattttggagcctatttgtaaaataagcagggaagtgtttggggaagagtgttggcttaggtaggaaagaaaccctccttggtctttgccctgctgtttaccagccacgcggccttgggtaagtcattcaagaaatgtaagcctactaactgtcaaagcctcagttccttttacttgtaaatgagagagttgaattaagtcaaagtagtcagttcaacggcttgcaaagaataagggaatttaagaaagcagagaagtttcagggaccatggagaacaaatcgtgtgtagctaatatgtaactccagaggatggttactgtacaaaaaaagcagatcaggcattgtcagcacatctgattatttcaagggaaccccagatctggatttttatgtgaaatattctaatttcacatataattagcamctcattaagaaaaaaactaaaaatgtcctgyttagggcaaaggagacatatctgtgggctcatcactgcctgtggacaatctgtttgcaaccttgggaatagatgacctctgacaccagattaatcatctgccttcaaaattgactaacttcactggacccagtcccaggtggagagtctgaaagcctagaaattgctgcagcagcatcaacttcctgttggaagctggggaggcaaagtcttaccctgagaaagggctggatttctcttaaaattttgaaaggccaaaggtggtgtcagcatttttgtgatatggcaggaataatactgtgcagtggatagggagctctgaattcttaccttgggtgtgctaaaaacctagcctggacttggttacatcccctcctttctccrgtgttctcttggtgggtttataattttagattaaatcagtatttctcaaacttcaatgattggtgtattacagtgtggtagccagtctctgagatgatycttattccttgtttttgcttccttgtgaagttccctcccatatggaataggagtgatttatgcaactaattagagattgcagaagtgagtgtgtgacttctcaggatgtgtcataacagatattgccattttcaccttgatctctcagatcacttgctctggaagtacactagctgctatgtcatgaggacacttaagcaacactgtggagaggtccacatggtaaggaacagcyagcaccaactcacaggtgaatgaaccaccttggaagcagatcctccagccccagtcaagccttcagatgactgctgttgyagctcacattttgactgcaacctcatgagggactttgagccagaatcatccccaattcctaacctacaaaaactgagagataaaaacatttatcactgcttaggcaaccaagttttgcattattttattatgcagcaatagataactaatacaaaatcatgattattgctatattggcctaccattgataatgttacacattaatgcatgtcaatgcatttaaatggtttattctttcaatttaaatagatttattttaagaggaaaagttttatgttgtaaatraaaaataagcatcactagccacaaaataaaaataactcagaatttaatttccttttcctgtgactsattttttatttttatgttttaaaataaattttattgcatgtatttaaggtatacaacatggtgttatggaatacatatagatagcaaaaaggttactacagtaaggtaaattaacacatccatcatcttacacagttatcttttttttgtttttgtttttgtgtcaagagcagctaaaatctactcatttagcatgaattcccaatatagtacaattttattacctataggcccacgttgtacgttaaatctctaaagttatttatcctacatatttgttactttctctcctttgacctacattttcctacttcttccttttctatctcctcctttgccccagtaaccactgttttgttctctaactctgtatatttgattgtttttaaaagattccacatataaatgagatcatgcaataattttctttatttttctgtctatgtctggctyatttcactaagcttaatgtcctccagacacattcatgttgtggtaaatggtaagatcttgttctttattgggctgaataatattcccttgtatacatataccacatttttgtatccattcattcatcaayggacacttaggttgtttccatatcttggctattgtgaataatgctgcaatgaacatggaagtgcggatatctttatgaggtgttgatttcatttcctttgggtatatgcccaggagaaagattgcattgctgggtcatatggtagttctatttttaatccctttagaaatatccatactgtttttcataatggctatcccaatcttctccaatctaaattccatttagataatgttgcctgcagaagactctgagcctaaggcatctcatgtctttggaacaaaactgggactttatccttgaattaaacaaagtgactgayacgcaattgagcagggaataactttctcacagtgaaatttgatgttaaaatgccccctctctctacacccccaaactgtcttacagtcttccaaaaaatgttggtgttttcttttcccccttttgggaaaattagctaaagtttatgtgtttcttcacattccaaaacattctaagatagcacataatctctgtgtcaagtaagattgcctataataaagtcctgtaaaatagctcaccccagtttttttgaagtattgctactaatataacgccttgtggttatttaaagatgcacagtttccaaaaccctgctctgttcactgggctttagtagcaacaaagagactaggtctgcctgaggattatcatccttaaatgtatagattaggaagttgaagcctggagaagtgaaattagataagataataagataattcatctagtaattagtagggctggggttagaacctgggtcctctgggtcctccatcactctgtgtggcctgcacagaatccagtccatggactcttcacatgtgagkactctagctgcacatgtggggactcccaagcaggtatagtatatcagagcttgaaggaaggctggcatggcagggtctggggtggtttgggggcctgatgcacggttatcagaggagaatctttaaggaatctgagaagctgagaagatagcaatgtcaagctcgccaagcagctgccatggcaaatgagattacagaagcagtcttccctgcatcccagaggctgccacagctgagagtttaaatttgcagcttcagaaaggaaagcagacacacaaatgtgcacacgaacacacacacacacacacacacacacactcactctctctctctctctaatgcccatgtgatatcaaatgtagccttgacaatgctccagcccccacagagatgctagtctctcccacttctcagtcaactccctgaaccccatctccctacatggctgtaggatgtttttgaatttctactaaaaaatatttctgaatctttgtgcatcttgaatttgtccaggactaaagaaagaaaagtatattttgatgtacaggaatgcatggagctttgtggttctctrctcaagtggagtagtatttttatgtatattgggtgacaaaacattcagattacatggaaaccaaacatgtcaaagcattttggagaaataatttggtagctatttccagatgcaaaaatacttctgtttctcagtcaagttctttgtcctatttaaacacaggccactagagctagtaattgtcttttcttaggatattttaaaggtcctggaacacaagactggaaccctggaaggatcagattgtctcattttaccagaagagagactgaggcacaagaggagaccaagcatggctccagggacgctagtgagtcacctgcagatgagattattcaactgtataaatgaaatcatgtttcacctgcaacraaagaaagcacaaatcaccagtttttacttctttctcttcttttactagttttaaatggctaaatggatcacctcccttccattcccccactccatctcccttaaatttggaaaccaattacattccagggaggtagagatctggtgataaaggactcgtttcaggtttcacacttgaatacatttttacagcttgcttataaaattctgaaagctggtctcctagtagaagggmagatgctgtcaaatgctaaatggtgcagttagagggacattcagacctcctctctagcccttcctctttttctggcacccaaaggcacgggcctttcctgtcagctgtgcaggctcctcattactttctaggatcagcacatggatcggctctacggggtgtcagactcagtgagtcagcaaagcaaagcagctgggctgagacagtgagacagtggacagtcacccagaacagaggcagggctcatacaccagcagccggggaggagaagctgtgcagaatccacatcagagacatagacccaggggcatcattctaatagagggcttccacttttgatattcttctttgttgtctggtatgatgcttaataagtggaaggtttaaagggaaggtgtgggggtgagtctatttattccttgtaatatttttccgccaatttgaaatagacgaattagttcagactatgacattttggctgatgcaaccttattttattacttattttattatagatcagagtaaagggttaagtcatttaattcaggtcaaattctaaaagaaggatattactcaactcataaactatatagtctgcatcaagagaaatggcttttatcaacagcaatcaaactcccttatccaaaatagtaaaatcttgagacttccaattttaatgtaatattttccattttaaatatggataattatttgtgctaagtagctaaatataaccagagacattaatggacaaatgataacaacacaaataatatatttataacagttagcatttttaagtacatcatttaccatattatagccacactgcagagaaatttatttttaatggatgctacctttgtagctcccctaattctgaaaagattttgtttaatctttttagcaactctaattaattattatcatcttcatatacatttgttaattcaacagatattcaacagatatagctattatagtataagaaattaaaacaaagtgatgcgaaagaccaatctcaggggagtggagatctttggtcaggatatgaagggaagggctctctttctagatgatgggtttccaggtacaaagagatgtgaagatgtgaagattgttccagggcaagctccgaggtgggcaaagtgactggtgatggtggggagagggacaggagggaggttgatgaggttagcaggkgctaggttatgtaaagccatgtgggttgctgtggggaattgagatgagaaaacagagacattgaaaggcattaagtctcgtttccaaggccacactgctaaccgggagtggtggcaggtgtctgtaatcccagttacttgggaggctgaggcaggagaattgcttgaacccaggaggtagaggttgcagtgagccgagatcgcgccactacactscagcctgggwgacaagagcagaactctatctcaaaacaaaacaaaacaaacagaaaagaactgaagcacagctaagccggataagaatttatctctatctctaagtgtatctctctgtcttatgtgtatttcctgtatctcagtttctacatctgtgtattatctatctatctatctatctatctatctatctatctatctatctatctatcatctgtctatctttctatctctstattatctatcagctactatgtgccaggaattgtaggctgaggagatgtgacaataaacacaattgccagagttcctactctcatggatttttaataagtgcaataaagcaaactaaaatagggaaaagggatgtaaagcaaactaaaatagggaaaagggatgtagagtaaaagggtgcttttgtggataagatgctttaaacagagaatatctttgagtggaggcaggaatcaagtgtggaggcagacatgcgctctgtgtctgcagctaagatagctttgtaattagcattttctaaatacaggaaaacatgattgtctttattgggtagcgtgaaacatgccatgactatcttgaggtgtgtgtgtggggtgtgtgtgtgtgtgttgatcaaatcctttcccagaccagaaagagcaagaaaaggtcagcctaagttgtataaacaaagaggatttggaggcttcaggttaataaagttttgtggggtttagagagccatggaggcggtgttcataaaaatagagaacccaaccagacagaagtttgtgtgtgtttgagacatgagtctttggtgtctacacaccaaaaatcagttatacctggagaaataattatgacattttcaacagaaaagtatttaggcatggttaagatctgacccccacaaaagattgaggaaaaattgatgagttcagcaacagccaataaaaagtcatgggaagactgaatgttggagtttagttacctttgggtctgagaaactgcattatattcccataaaagactgaagattaagccatattcctctctctgtgcattatattccttcttttttcttttttccctaacagaattttagttgcttgaaaagaattaacatagagcagaattttgaatatggctaggattagctattgtagcataaggtaagtggaaaagaaccccttgtcatgttgagtttttggaatgtctagacatgaataaaaattaaaaggtatcattgattgtttctgttttaatgagtataaagtgaattgggcaattcacaggctaactccaaccattttgggcttcctgatgactagggccaagatatttcaaagagtactaggtgatttattgggtcttatgcaattattattccaagaagagagatgtcgtgtccttggcttatgggtctggaacctactcatgcatctgtctatccaggcttctgtccatgcatccaagaggcttttatggagctctgtgaatgtcacaaagatgaatcaggcatgccctctgttcccaaaaagctcacagcacagccacagatgaggaaatagagaattatgttttttaaagtagggtaagtgtaggatggtggcaagggttagatgttttgggattgggggtaatgatcccaaattggattagagcacctggtaacagtttctcagaaacgctgatgattatgttcatcctagagaagaatgtgtggaggttgtgcaggcacagaaggaagaaagaggttttccaggaagagggaattgtacaagcctgggcagaggcacaaaggggtggaagagcaagattcactcagggaattgcagtaaattggcaygactggagtccagactacatgtttggtcaggcagtggggtaggtatagaaaaggaaagaatggccaagagtgagagactcagagtatttgggatagagttatgagaggcctgggggacactataatgaacttggatttgatgctagtagctctgaggaaccatgtatgtaatttaaattgaaggtgtctcactaagatgatggaagttccattgggctcctatggggtgagtagaattctatggcaattttttgcaataattatggcacaagagtgaggccaagagtaaatgatctggagtgtgagaagccacttaattctttgtatgttggtccttaaggtgtaagcatccctttcatggaccttttgtaggtccaatgaatgacctcaacatgaaaccttgcagataattttgaaagaaaaggaaaaaaaactcttcaatcatgaaaaggtctccattatatttccaagctatgtgaaaatttttattatatatcaattactttggaaacatggccattgcatgacactgtttctcattcatgaagggaacacttctgttttgaatccccagcggtgcctggtgtagtgcctgagacagagaagaagcttagtaaatgttcaaggtattggtttgctaatgatccaaaccaagctgtgtttgggcccatttgaacatttaccgaaccatgttgttaaatataaggaatgtcagtaataaccacaaaagtaagtcagtaaagacaatagagcaatgtcttagtagttatcatctactgaagatctgctcttagctaggcatggtcgcaggctctttatgcctcatttcactaaatccttaccatccccacactgtgtctgttttattatccccctttacagttgggaacactgaggttaactgtgtttactcaacaatctcagggtcacacagatgcagagtagaaaagcaggatgtgatcctaggactaaaggcagacaaagtctatgccttttctctcctattgcagtttccacatatcagcaggtacttcctgtgaaagrggaagcacatttgttctcctggctccagagaagagaaagcagactggcagctctcccatgagggaaagaggagaactttgacaggaatttacgaccaccagggagaacagaactaacttttctgtaaggctgtggccacctacccctgaagatgagatgctgatgtagaaaatggacagccatctcttagaggatctgcaaaataatttctattctgrttagaaaaattaaatacattcactttatctttatgatcttgagatattccttggatagtaacaacagctcctgacatctggagactatttcattttagacaaaacatttgcatggagaatctaatatgatcccatgtgacattctttttgggacaaggtagctgttgctcagagaagcagcaggaattgtccaaggacacacagggtgaatgaaagacttggcagtgggacctgggtycaataatttcaagaccagtgctccttcacctatgcatgttgtctactggagtgaagcaaaaatatgggtctatagggcagtrttatgcagaatgagtagtttctttccattattagcataagccatactctgaagctatttctgagacagtcatccttttctatgtgggtcaatgttcctgcagcatggacttccttctgggaacaaagcatcctttaggatcttccttaatcatcctcatcagtgtaatatgttgcttcctgtccaactgtgccccatttccataggcaatttatctgtatccatagagacaccagagatctgcttcttacttcaaatgtttcatatctaggttattcttcctgacrtgtgagtccagggcacaagtctaaagctcccacttacacagcccagagggactgagccctgctttccacagtcaggtcaggagcacactgactcctgactgtggaaaatttgtctgtgtgctaagtgtaaacagatgtccccagctgccggatcctttggccatatgaaaccaatcaccaactctacacaaacatgcatcatcaggctaaaatctgaaggtgcaatgaactcaccctgcttcccataggacagtgggtgagtagaggctgtggggagtttggtcagagcagtccatctaagggcaaaatttgtgtggtttaatgagatgaaagtggtgaagcggggccaaaggaagtgcagctcagagttaggatagatactggttcaatatcatctggacactttcaaccctgtacacatgggggcactaaggtttgggggtagaagtgacttcctcatgatctcatagcactctagtgattccctcagggtttaatcacagatcagaatgcccaggccagtactcattccattatgtaaggctgcctatgacactggctttcccttgagcttcttcatgtggagtccttgcatctcttatgttttaaatcctggcagttttggattgacttttctaagccatgtgaactttcctaaaggataaaaatgatgatgccattgattgtgggttaatattaggttagcctagatgttctatgtacttaattgcattaatagccctaacgtaccatgaagtaggtcttctattttaaagaagaagaagctgatactcagaaatggaaagagggttgmctaaggacacagcttttagatggcacagcctgaattcacatcaagacaagttccaaagacatagtttaaagaatcaacgaagttatactgaggcatctgattgacaatataagatggctgcatgattaatattatttattcacttaaaagaatttattgagcatttattatgtgtctggcagtatatgtggtttcaaagttgagcatgacattattctattaagaaaacagtgtagtggtggagttggaaatacaaacaaacccctcatttatgttgaagcaattgttaaatggatgattgatcaggtataattggaatagagtaaaaggagtgcatcagtttgtctaaagggtaagagatggtttgtcagaagaggtgacacttttctatcaaataggtgaggatggaattcaaagcagaagttgacagtctgtttagagaagtgaaaacagaacaaattatggaattgtggaatacttagggaaatacaggtcattaggtattgttaatttgttaaaatataagcagggaagctaaaaagatgatattaaatatacaggttacaaggaccttataggttttactaagggagttagaattgttctctgagggcaattggaaaccatggattggttttaaacaaaaaacgcatgatggacgtattgtttaggattggatttgattgttagtaatgtgaaactctaaattaatactggcctaaaaacagtaggagtttgtttttcatstaaaagtctggcgttacatrgtcgaggattaatatgatggctgtttaggaattcaatattttttcaaccatccccrtatgtgaccttcagactcacattctaaacctataatcagggcaacaaggtggaaacaatggtaaataagaagagagttacacagaggtaccagtgttcttttaaggaaggtcctcagaagcttgcacaagacacttctgcttttatcttatacatcagaacttagttacatgtctacactcagctgcattaaaggttgggaaatacagtctttgctctggatggtcaagagcccatataaaaaatcaggctttgtggttttctgctagaactgaaggatggatattgaggcaagttatcagtaagtattttcatattaaagagatcactttaataactctgtggaagatggacaaagatatagggaagacactgaagatatgagactgaggctggtgataaccatgaggctggggaatgctttccctttcaaatgacctaggctttgcccaattaaggaaattactgtcttagagttacttcttttctattgagtcagaggtagatatatgtctccttcagcaaatgagtcatacccaaggttgggtaaacttgtttagatatgcagagtgaaccacgatatgaacctggtttggactgtatccttcacagacttaaaactctgctcatcattcttgtgtcctcaaatagccagatcagattttttattctgattttctatagagctaagataggtaagaggaagtttctatccatttcattctggttagctgagttaacatgttttgtctgttaaatattcatggaattaggataagaacatgagttttagaaccaagaaaaatgggaatgaaaaactcagctctggtactaatcccaggttgtctggtttgtgagttagtcctgatcatcaccacaccatatggcatcctctggctcttggtttacttttccctcttccttaagctgttcattttcaagtaacatggggaaagtcacaccagtcttactgagtatccctaaaaaatggaggcagaagaatggacttgatgatagaaaaatttattcttgggcactaagcgtgctcagctggctatgtctacctccatacctcccctttaatatttttctcctggcccaacaagtatgtccagggccctataaaggaaataatccagcatatgtctaatgttggctcacccagtcctcatcagctttgagccatctcactttgcttctaatattcctaaagcccctcttcttcagagtccctactcctctattttactcagtttctcttgattctatatcatggcttcattcttctctacagtgtttctaggaatacgaaagagtagggatgttgtctgaaaactccaaggttgagatataacatactgtttaataacagagatgctgaaatcaaactggtatgaatttacatctttcccttactactattaattctggaccttaagtaagttgtgtacctttttcaagtttcctcatctgtaagaaggaggacaataataattcctatcttgtatgttattgtcagaatttaatgagttaacaaatatatgtaatatatatgttttwtatatatatacacattttggtttagtgtttggcatatagttaagtacaaaataaatattagctattgatattaattttggggttggaggtcaagaaataaggctggaaagttgggaggctccattgtgaagagtgacttaatgattaagaagctggattttgggcaagaaaaaagaggggctttggacaggagagtgcattcattttctattgctgccgcacaacatgaaacttagtggtctgaaacaacacagactcacagttctggagatcagatgtgtaacatggtaggcagattgcattcctctggttttggggaagccgtacctttctcagcttctagaggttctccatattccctggctggtggccaagcatattccgaattctgcttccrttgccacatcttcgtgtctgcctgactctactgtgtctctctcacaagaacttttgtcccagatagtccaggacwatctccccatctcaagatccttaatttaattacattggcaaagtcccttttgccatgtaaagtaacaaatttgcaagttctggggattagaatttgggctttgatggaggacatttcagcctaccacagaaagtaacatggctgtctggggattttccaggatagcttgtgagattagagttaggaaggccagttaagatgctgttgtgagaatgtgagaatgctgttgtgagaatgttgtggggaatgtgaatgtaagcattaggggcaatcaggacactggggaggaatggctgctgaagaactaaaatcaccaagacttggctaatgagattaggagaagggcttctttctagatttctagctgcagggactttcagctaggggatggtggtgtcagcaggagctggcaaataccaggggaggtgaccgacacattgactaaggctttctgagaaatcttgcttcctgtagcctgcagccattcgttataaaacacagagagcagtctggcccagaacagagtttcccacayttcactcattcttaacaactttttccaaacctgtctttttaatgtttcaatttctgaatatttttctttaaatagactccagtaaaagtagcttcatcctaaacaattagtttcacaaaaccacaactctgatatgcctggatatttggatgcacatactattcatacatactcattaaaatggaaatgtatttttccatgcaccagctaaaattatttctcaaaccatcagtgctaagcaaaccacatatatgcaaatgtcggggaaatgacaaraacacagactgagagattcaaacctagacttgagtgtatcacttgagtccctggacttttatttcctcatatgtgaaataaagataatgtctaacttataataacttagttagataattagtgtatggaaaatgcaaggtrccatatcttataacaggaacccagcctattatatgcatttatattgttgaatcttgtgatgttttttccttatatattaaataagtcagtcttktcataagacctgtcagttaattttgataaacacactagggaattcatcgtctttgcagtctaggtggcaaagcaattttacttactgttttttattacctcatgagtcttctttacttccagggtacttctttacttccagaggaggtatggaggtatggaggtagacatagccagctgagcacacttagtgaccaagaataaattcttctatcgtcaagtccattctcctgcctccactttttagggatactcaataagactgatgtgactttccccatgttacttgaaaatgaacagtttaaggaagagggaaaagtaaaccaagagccagaggatcaagtgaccacgaggggcttagggaaggcattcatccctgttgactgtgctaggagaaccctgggtcaggagatgctggactcctgggatagaaaacctagttcttttcaaagatttaaagtaaaggtttgaggtggaaagccctactgttttctggactatattagaatcattcctctcctcatggctgtggatcatattgcttataaaataccagcctcgtgacccatttgagaacatcactgaaggtccacaagataggaccaaatgggttttaaaaaacaccccagggtctctccctactgaatccctacccagtctaacagaattagactcaaagcagcatttgcagaagatagccctgtttgcatgagctttccaatgatacatctggttttccttttgaaaaaggccctcaaacctcataaaactgaagtcctttgattcaaaccacaaattccttatagctaacctcagcaaaactccttacacactctgagtacttagtccctgtaacccttattcctcttttctcttccatcttcattaagttagtgggagccaagcttacaaggataaatctgattgttttgttcaattcacttcatattaataaaaattatgggtcatttttctgccttagacctttgctttagaatagctactatttattaaactctaactatggccaagtacattacatagcatcccacttaaacttacaacaggcttacaaagtaggtggtatttttccagtctttccaatgaggaaagagaaacaagcaaacaaacaaaagttattgtttcattgtcttcctgctgctagatgatagatctagtaattcaaatccagtcggtataactccaaagccctcacttctcaagtttgtctctctatataacagattcctaagagttaattttcaaatacgatttgatattttaacaattcctcatttgcctcaggcaattgttatcctgattattgacttcatggtgatgacaattattgctactatgaataacagctcttatcctctaagtgttatactgtgcattttatataccttgaatacaataacttcttgaggcaagtattattatctccttttataaatttgtaaactgagatgcaaaaggtttgttaacatttccatgatcacagagcactgaattaatgggaactgcaaatactaacaaaaaggaaaactttgtacatgccagcacttttgaaatatattttacatggttaactcatttaatccccacaacaaccctgtaaggtagatagcattatcatctgccttgcacaagtgaggaaactgaggcacagagaaataaaatgattattcaaggtcacacaagataatcagtgaaagagctagagtgtgaatcagtatggccttgggtctgactcagagcttgttatcacagcaccatgctgcctaactatctgactgcaaagttcctctttgctctgggcaggtacctatgtgagtgaacttgaaactctatcactcattccaattcttttattcactggtgatctcactatgttgaaaggacaggatttgatgcatgccgtgtcagtggtgatcactgttattgagatagatttgcaccgatgtctgggagtttggactgaatgttaataacatacaaaggtgacctgcaataaatacacagctctgtcagaaagctagaggtctgcttggcagagagagtcatcatggattgtggcagattctccttctgtcaaggcttatctgaaggctaaataaatcatgctggaatcttctgggatgttggaagagaggaaaaagtatgtattggatgggggtagggatgtggaggaggttcagatggaaatggaatattgattagaacaaaggtgaacttgatgtcagccagtgttctttttagaaatgaagggccaggaatggaagttaaaaaagagaaatattttctttaattgcaggcatagaaatagagaaatcaacatctgaagaaattctaagtgacacactgggctctagatagatgttactctatgtttgattctcaatttttttgatctaatgtttctgcaactatgaagatgtagctacactacagcataaagtgaactccttcacaatgaaaatttatttgacacatattaattgataactgacagctataaattcacatttagattgacttcaatataaaatattcacttaaattgctgtgtagtcacatttcttaactttcccaacttttcaagtataaatgatgcctgatgtttggcattagttttgaggattcccaagaacagctatctataccaacgtttaagaagcatcttcatagtgcagatttatagaaagatatcctccagcaatacagaggctatgtgaaaagcagtgtgaaggtgacagatatttgtcacctatgttatgtcaggcactgtgctaagtattatatatgtagcatctcatttaataataacaactgacatgcagagttgttattattaatccccattttatagacaaacatttccaggactctgagttatattgcacaaggctccttgatgttctcatcatgcagcagaatttgaaaaccagtctgtctgatttcaaaacttgtgttcttttaccagaacaccatacactgcctctcagagtaaaggagagataaatcagtgaggacagctaagttgggaggtcaggagactctctctcctggaagagaaacaccgaactaaaacaaaaccatgaagttcagtgttctaatttagaacaccaacctttgaagtcccatattctggcctttgctgggtatagaatacgagccatctcatgctctaagatggctggtaacctttatctctttcttccaggttagaaagttagctgtttctgaaggcattaatcttagtgagaaaatatatcatacattgtaattcattatgccacacagttcgttcattcattcaaaaatgttttctggtagattgactgaaaaaagtagctctggttttatttatttatttatttatttatttatttatttatttattttctcttcccatacccattgcaatgtgacattgcagattttatcaagaggtagtctatttcaccatgattttaatctgggctctccttgtatcttgttttgtccaaaagaaggtggcagaagtgacaatgtgccacttttgattgtagattatgagaggctttacatgcttctgtttctctcccctgctcttgcatccatcatgctatgggaacaaaatcaggccagaatacaggaggtgaagagagacacatgcacacagccacacacagaagcagagctgcctgattgaacacagctaacctcatgttcatgagggaacccagcagaaaccgaaagagccacctagctaagcctgctttaagttgctgacccaccgaattgtgagctaaataaatggttgtggcttcagccactaggttttgggctggtttgttctgcagcaccagataactgatatctattcactaaaatgcacttgggtgccaacattgtggcatgctgtggggacatagaggtgattaagttatgttccctgttctgaaagagccggcactccaaataggaagtcagacatgtaaacaaatgacaacatagcaagttatgggattaatcaaagtaactggtgaactccttttagtaggaatagttctatttcctctgtaaagaaaccactatgatagggagcacagtaccagttggttccaataattcttgtgatagtgtcatccaaacctcagactgcatcagtggtcactcagcaaggagccttgaagattacccaatgctatttatatctattatatgatcctcattaagtaacctcaaaggggaggcaggagcttggaaccagagctttttggaagaatttctttaaagggatagtattctgtgattaaattagaaatagcaagatacttgggagtactgattaaaaattttagtcttttggacttttaatgactgaaaaaattaatagagctctaggctccagaaatcaggaacttgctgagtatctcttttttttatttttcagagaggaaactatagcagctggcagatagattagtgtaaagaagctacacttgggtttgaatcccagctgagccactcagttacttgatcttttgctggtttctgaatctccatacattttgtggtgcttatgtctaaacagggataaagatatttactttataagtttatgatgaggactaaatgtaccaggcacataattaatgttaatactttccccattccttcatttttaattctcctttgctttctgttgccattttctacttttttcaaaagaatctgttggagccccaatacattaaccttcatgaaattgggtcctgaccatccgtgaaatggatgagtttgaacacttccccaatgtcggtctgtaaaagcacattttgaaagtggctttgaaggactgtttgaataataagatctattcatgatcacagagggccgagacaaaaggctgagacaagtctgtttggagaaaactctgtgtggaatgtcaatgcacatattagaacccagcctgtcaatttggtccacagagagaatggtggttttatgacattattggcaccacaatctaacaactctcaaccggctggggcattaaacatgacgaaggacacagatagactaccctagattttttttattcaaagggagcacatgtaatgttctcatgcaaaccagagaggaagtgagaattctttcatcttccttttctttgctattaacctcaatcacataactcttgggttaattttccttctataacgagaacaccaaacagaaaacacatgtgagaattaaataaacacagagtagaatgaaggctgaatctatggaatctatcaggacttgtttacagagaaggtaaattaacaatttcttggaggcacagttttcttacctgtatgataggaagaatcactgttggaataggcattagtgttagggatgcttctagaaagcctctctactagcatactttctagtctcaggacctttgcacatactggctctctatctagagatcccttccttgccgagatgtttttaggttaactcctcaaatttattctggcctttttccaaatgtcatcttctcacagggaacttccttaattatcttatccaaaattgtcatcctattaccgtctacctcctcattctggttgatttttacattggagcatctatctgatattgtatcatatatttacatgctgccttattaattgttcatctcctacaatcaagtgacagtctcacaaggtggggactttatctgctttgttcacttctgtgtccccaacacctataatagtacctgctacataggaaacactcaagcatttgctaaatgaatgaataagtaaataaacatgcaagattgttttggcaccaaaaattacagcatatagtaggcattctataactgttggcagaattaacgagtgtgcatatccatctgtgagcagaattagggaatcaccactctccagcaagccagtgtctctctcacttcacacccctgcagattgcataaggaatgtccagacactttctgtttccagaatgatgtaatgtggaaggagaagacctgcagaacatgttgctcacagacgagacagatgatctcatccccttcctgggcattcccaggctttgctattaaaaaaaaaaaaaaaagaaaagctgcaatgttcaattcacaggtggctgtttagtcctcagccgtttattggcaaaatactttaactcatctcttagctccctggtggctgggaggaggagaggaaagtcatgtcagatatcatctggcctatttcttcagccaaatggaatagatttaccctgagaaactaggacataaagggagagaagtgcactttagcatcagccacaggggacaagctgtgagcaaggggtgatgggggagtttaaaaaacaaagtaagccaagtgtttcattgacaccagagagctgagattgttcttgggattatttcaaaagtctagagcctgaagaaatgatgtacccaatatccctcacgtggctcatttttatttgaaaaatcctttagttttgatgtctgtgtatatattaaactgatcagaatttcaatttataggtatttattactctacggtttataacacatttcaatacacagatcttcacaaaagtcctgaaagtgaggggtatagaatgatccccctttatagttgaggaagctgagtttcagagaggggaggtaaattagccaagattgcacagctagagagcagcggagttgccattggaactcagatctagttatctttaagtgcaaatctccaaccaaatcttcaattcaagacttaaaaggtgacctgcttgtcagctacagtgtttgtatgcctcaaaggtttcccacatctcttttttccgtggttagctattagacaccttatttcagatctggggcagtttgggatggcaagtctgtgcacaaatcaagctgaagtccagttggatgtctcctgaacaattagtagttttgcaccgatttattaataagccaaatagtactgtcgactccaccctccaaactcgcccctcctctcttttctatccccttcccaccaagatgttttatttattttttttcagaagttggtgttagcagctggtcaagtcctaaatacaaaatcatcctttccacaaccatgtttcccatccaatccatgataaaattatccaattttcattgccaaaatgcaccttgactctgtccctttttctccatctttatggccaccaccttagttcaggccaccaatcctgagccttaggttattatatctgcctcacagctgctgactctccttccactcttgcttctctcattcatcatatgcaatgaacacaagagcaggtgtttttgcatacacccatttttttgtgtgcttaacctctcaaggcattttgatgcatttacaaaatcctgaagccttaacgggaccataggctcggcttgatctagcccttggcaaccttgacaaacttatttgtgcccatttcacacttgcttattttattctattccagaagctgctgtgtagagagaaagctgctgctgctgctttttttttttttttttttttttgagatggagtctcattctgtcaccaaggctgcagtagtgcagtgacacagtcttggctcactgcaatctctgcctcctgggttaaagtgattctcctgcctcagtcttccaagtagctgggattacaggcacgtgccgccatgcccagctaatttttgtatttttagtagagatggggttttgccatgttggccaggctggtcttgagttcccgaccttaggtgatctgcctgccttggcctcccaaaatgctgggattacaggcatgagccaccacaggtagccaagagaggtagcttcttgagagtaaaacacaccaagaagaaagtagagcttggatgctatgagagcgtgaacactggcgatattgtttgaggccctgagtgcatttatgccttaagtgctgcattgagttattgagccaatatatcttttcctctgtgtttttttaaatcaaaatcaagttgatttgagtttattgtcacttgcaacaaaatatttctggatttccacaaattcacaatcagttggggaaaagtcgatatgtgaacaggtaaacactgaaaatagatggtttgtatgatacaggtgaacacgagggcctttaaccagtgtgggtgttgaggtgggggaaagtgtccacttccctccaggagacaatatctggtctgaatcttgaaatatacttagcagttgtcatgatgtatctatcaaacagaggatggcagagagacattccagggagaagagaaggcatgagtcaaggcatggcgtgaaatgggatgatagtttctgggaactacacgtcactcatactagctttaatgcagcctggatggtgaaggcaaagggagagatgctacagagaaaggcacaggccatactgtgaagtgtccaatagtttgtcctaacaagataatgttatcctgggaattttgagagagcattgagaaattaatttttccactttaaaaatgaacattctaatccttccccagcctatgtaccataaaagatgatggtgaaggtctcttagtaaaacgtctgtgaaaatgctttgaaccaggtataaattggctaattatactatggaaaacagaaactggaatatgtttgatgtcttctagtttccaggccctggacaaggagagagaatctgatatggtttgactgtgtccccacccaaatctcttcttgaattgtagatcccacaattcccatgtgttatgggagggatctggtgagaagtaattgattcatgggggccggtctttcccatgctgttcctgtgttagtgaataagtcttatgaaatctgatggttttataaaggggagtttacctgcataacttcccttctcttgtctgctgccatgtgagacttgcttttcacctccttccatgattgtgaggcctccccagccacgtggaactgtgagtccattaaaactctttcttttgtaaattgcacagtctcggttatatctttatcagaagcgtgaaacggactaatacggactcaacacagaaaggagaagttgagaggatgtgtaggtgggttttgtgtcccatgagatttcagttcctggcagtgaagacctcaatggtggggcacccttggaagttgggccacatccttatagtgagaggagaaaacactgcttgtgtagttagcctatttcacaactgaccagagtagggcctgctccctacccttctgtgcctccccgttgcatcccaataacatgatcccaaagtagtgtttctgattcttaagttcaaacaacttcagtggtcaggaactttgttcccagaaactgtttccccacgtcccttcttatattacttcctgtatgtgttaacactctccccacccaaccctcggtcattatatagttgaacaaagccaagagtatgccacagtggcaggttcgcacatagtcagccccagcttcagtgtggggacatgattgaattctcggcggctttgaagcctggaaagcagggttgtaattgacaatgcaccaggacaagcatttgttctcatggggggtctcccatccgtgagatcaagaatcctaaagccacatttttggcatcagcctccctggaccattcagtatgaccactaagtgttagattgactctgggctgattgcttctgctatttagtgagttgagatgatgagcctgagctctgagatgttgcaatatgagtctgcccaaataaaaccacttaggattgtcacaggaaacaaaataatgtgcctcttcagtttaagggacaacttggctacatttggaatttaaagagtctctcttccttttctcagtcaagggtacaaagtgtgttaaagtaatatgagatgctttggctaagtattcaattatctcattcatttacttaacagttattgagaacctgttctgtgtcagaaatggtgctaggacttagataagctgaataagacactgccctgccctcccaaaacttgccatccaacagtggtgttgagcagtggtgctcactctcaactagaagatgaaggattccatttcctttccagctctgccacagtgctgggaatacttgactgtaaggggagagctttctgtttacaagcattctatttcagcaaacaggggagtatcttataatcaaggcattataagtcctgcagatttaaacttaatctctcaattgctttatttttaatgccacaaatattattcagaaaaaatatatgaacccattaaaaatcagtgcaaggtctggatatataaagaggccacctggctgggtgcagtggctcaggcctgtaatcccagcactttaggatgccgaggcgagtggatcatgaggtcaggagtttgaggccagcctggccaacatggtgaaaccccatctctactaaagacacaaaaaattagccgggcgtggtggtgggcacctgtaaagaatcatttgaacctgagaggcggaggttgcagtgagccgagattgcgccattgcactctagcctgggcaacagggtaagactctgtctcaaaaaaaaaaaaaaaaaaaaaaaaaagaggccacctgaccaaatgttaagggaggaggcaaaaatatttattaaattttgtaattattcctgatagactgcgttgcagaattcaagaatatatatgtctacaaaatgaattaagcacacacaatgttcagttgttaggcaaattggtatttgtggcttgccgattaacaaagaactagacctcaaacaaatcagatgcatccaaagtactggagctctgcaaagctgttagatgacttataatggctggaatctgatatcagaagtttgtataaaatagattcatgaaaactaagagttggaagaaaatgcaattatattgcattaattgaaaatgcaattaatatttctaattttatgacttttaatatgtggtaatttgataaatatcataagtggacattttattatttcatccacatttctaatgtttaactatataggttaaacaaagagacaaacaacttgttgtcttgtgctcgggcacccgtggtaggtggctgatatagctggttggttttcacaaatgtaattccatctctgaatcttggtgccttcatctaggaaatgaaagtgatgaagtgcctgcttcctctctcattttcaatcatggtgctgttcaaggcagtatgctatggaaaattgtacatctacacattggctttgagtttatttaatagcataaatattattcagagaaaatacatgaaaccattaaaaatcaaccttagggctggatatataaaaaggcatgtttccccattttattcctggctcattgagttggaaagcctccttaaacaaacagacctccagaactcagcaaggcctgcccctgctcccagattctaaatgcaaaaaatgaagaatattttctttctcccatttgttgtatagatttagaatttagaagacatctcagaaggaagaaaatgatgggtggcattctgataacattatctcctcactgatgttttgttcttgctgctgttcatatggaacacagtagtaagtgttgtgtgaggaatgcaattacgtttaaaaaaggaggtgtaagaagctattatagttttgaaacacataaaggtgtctaaactcacttttctctgagttgtgttgatctgccacattagccgtccccatggattggaccatcctatgtggtccatgaaatctcccaagatatttcctgtcaaatggcctctgccactgctatatttatttatcttattctacgagactaaaaacatagttcagctatttaggtgggctctgactagctattacagtctacatataacatgattagatacatctgtggaaaggaacgcatggtgagaaaatgttttattttctctaattaatgtatagtcttcagaacagaactttgggtgttctggatttgtgtttggcccatagctgctgcttttcactggagcaggaaaataatgtttaatagctttgtttaaaggttttcgcttgttccaaacttgttgctgtagagtctatctcaatctgtgtgtatttaagaaaaaaggggaaacaggctggaagcaaaattgtgttctggtctccacccaaaacaccccctattttttttctttttttttttttgcaaaccatgaaagccttttaaaagctgctttgattagcttccacatcactccccgcaacatagagtgagatgctggtttgtggcctaggatgagagaaaggggagccgggactctcacgggacagcttggccacttgagtcttccaaacccaataggctttacttaaatcagagatgcactggaaggagaccaggggccttttgagctctttacccatcactaattctggctccagctgtactccgactcgggtgatgaaagagactgaaagcagcaggactcagcaagcattctggactggatctattcaggctgcgtttactcactttgcattatggggtttccatggcaacaggcacatgtttcagcatgttacatgtaaaggggatgtacctgacagtcttcctggtcaggaaaatcggatcatgtgccgcttcttccctggttgtctaaatgggctctaccatgagtcagtctcccttccttccatatgatacccacagagaaagatgctggaagtcagcgtccaagatcctgaaaccaccatggatcccagtggagacatctgagaatagagtctgctccaaagacagctggcatggttgcaatacatcagaaactgaggctgagtctccttccctgctcttacttggctcctggccttggctgggctttgagggccatgaaatgaaaatattttctggatattggccattgtgattgtgttccaaggactgtgatccatgagggagctggtaccaaagaaaactccatgcgtgagcctgggatattcctcccctgcgatgtctgtctattgctcatatgaccaacctgagagctgagtgtttacagtttataggatcatggagtcatattcaaagtcaatctggtttagtatattagagtatgaaaaaacatccactctctttttcttccatttgcattgaccatagtccataaaataggaccccgcatcatctaagaagttttagaaagaaagtattggttctagctgggtgtggtggctcacgcctgtaatcccagcactttgggaggctgagatgggcagattgcctgagctcaggagttcgagaccagactgggcaacatggtgaaaccctgtctctactaaaatccaaaaaaaatcagccaggcatggtggtgcctgcctgtaataccagctacttgggaggctgaggcagaagaaccgcttgaacccaggaggtggaggttgcagtgagctgagattgtgccattgcattccagcttggaaaacaagagtgaaactccttctcagaaaaaaaaaaaaaaaaaaaaaagagaaagcattggttctttctagacttctcttttactcatccccacaggagaaagttagacttctctgatagtgacaagagtctgattttcatctgtgctcatttctctgagggttggagagagtatgctgaagactgtgtgacatgtgtctctcttgactttgtatgtgtctttgtgcctatctttcatactagactgcacttttcatttctttctttatgtagttcaggaatatcatttatggatagttataataattgagagtttaaaaaccagtagccctgaaaacagatctgatccaatgatgcatttttgtctcactcatagagtgattgtaaggttttgctttgaatattaaactttattgagaaactttataataaaatcctgaattttaaatttatcttggaagatctggcaacatgaggtctgcagtaattagcaggaaatgagtgcaggctgctaccctgggtgaggggctctctggtttgccagactgccttctgtgcccacatcatacatctaccatcctggccactccagtgcacgctggagtatgtgattccaagaacaagaggatgtgtgggtgacactaagcgagataattcctgattctctgttgaaagaggtttgtatgttaagtttgtgtgatgtatgacctgtccttttgggtggtttttgaaggctgtacaggaagccaggttgcccataaggctggctagggtaatgcataagctgcaaaaccagcttccccaagtcaagatgctgaggtctcattataacaccagatgtctaggcactgcagagacggcagacaggagggagagggcagcttcacctgggaagaacagggagaatggtactgagttgggctcttgagtgtgaatgggatttcaccaggcacagacagaggagaggaagctttcagagcagaaggatcaagaggtgaaaaaaaagcaactatgaagcacatgaaactcaaaagactataaatgctttggtatgcctaaaatgtaggatgtgtgatagggacctgggagagatgaggcaggtaacaaaaagtccttttctgtcaatggaaaactactgaaggttattttttaatcacttactaattacatcagtgatgcacaattacactctctttgaaaggtctaaaacattatagataaacttcttcttgacatctacctcctaatccttatcacctctttgtctacctagagtagagtttctcagcctcggtactgttggcatttggggatgggtaattctttgctggaggtctctctcctgtgcattgcaggatgtttagtagcatccctggcctccatcactaaatgccagtagtaccacccacccccatgatccacacacagtttccatagccaagaatgtttgtagatattggcaaatttccgggggggcaaaattttcccaagttgagaaccactgacctagcaggaactagtgttatccatttattgataacatgggacctatgtttacatttacctgtagatatatttactaaggaaagtgctctcttttcttgttcacatagttactgttattctatatgtatctcttaacttgcttattctcaagcccatgtatttgggatatctaaaaatgctagtgcctaggaagctgtcgggttttgttttgttttatttttgaaatgtggcatagtattctgtgtagggatatataaccatgtatttatctacatccatgttgttgaacctttagcttgtttgcttctttcatttttcttttttttgtatttcaaataactttgcaattaatgtcctaatacatatttccttatgttgcatacagaagtttgcatcaggaatatggggtagacttgctgttattcatcttcaaaatgactaaaccattaactagattctttgtgcttctcagagaaatgcttctttcctattgaaaacaaccctaaagggaaaggaaaaaagggggacaaagaagagaagggcagaggagagagtgggagcaaagaaaacaaaaaggggtttaccagccactccactgattcaaactacagtgttgctgagcattggttcagaaaaaaaagttgaatagcgcaacagggtatttcagatgtcaaaggagacatcctggcacaacaggagggagggagaaggatgaagcttccaaatttgtttcccaaagcttctcaagacattgccccccaccctctgatttgacgcaaagccaaaaccagctgccttcaacattctttatcccaaagaaatgtgtccctttaattccctcttaagccatttatgtgagacataatttatgttctgaaaaaaaaaatcatatactttccacggacccctacttcctgggctgatagatcagcacagggcttaactctttgatgggaaattaataaattacatcgcccttgttcacctcactgcattagcaggtgtttgtatctgtcaaccttccccatggtctatccatggggaggagacccagaggttttgggattaatcagctctgatctggaggaagatgaaactgaagcatcctgttatggatgggtccttgacaggcattctgccacccaacctgcaagatctggcttcccctgtgaagtattttaacctccttgctcccctgattcaattccctgatgcttcatctcctatatacttgactgtccctaaggtcaagactgcaatgccttaagggcatgatgatgtctaaagcagccccttgctcctgactgtgctatgttgcattcaatttatctaagtaagtcacaaagtcagcccaaactcaaaagatagaggagccacaaagtcaaataacaaaagagactggatacagggaggaaattatagcagttatttttataaactatctacacgaggcaatttatgaagtttataaattcatatactctgtgaccaacaatttcagttttctttttctgagaaataagtacatatgtgttaagacattcattgcaattttatttacagtatcaaaacaacaaccacctcacaaataaactaaagtttcaataatatagttgtagataaacagaatatatccaaactacagaatactataccatatatatatatttttaaatggcagcttcctatatactagcatgtttagacatcctatgtgaagtaagcaaattacaaattggtacatataactaagtatgtgaaaaaggaaaaaaagaacattttctattgctaaatttacctaccagttaatacacagaaataggtgcatgagcatctgtagaaaatggataatactagttatcactaaatctgtgattctctactgggagtgattctgccatcaaggagcatttggcaatgttcgaagaaatttttggttttgacaccccgggggagggaatggtgtggctggcatctagtgggtggaggccagggatgttgttaaacattttacaatgtgcagagatgctccccacagccaaccattatccagtccaaattgctaatcatgctgatgttgagaatgactgccttatattcataagatgtgctgagctccagacatctggagtatccattgtacatttccagttgaatgctcaataagtaagacaaacttaacctgtataaaacactcctttaatgtctacacccctgaacttgcccctcctccaccctgccatcttacctggccactcacctgcctcacttcccacattgactccgtcaaaggacctgttggctctaccttcaaaccataacctgactgtttcttactcccttcggttactttcctatcacctaagtcaggccacctttgtatcttccctaagccacagaaaggggatagggaggatgaggaaggctggcaccatgtggccaggaaaaccactgtttagagaacgaactgatctcagtaaagtgtagtctctgagggagtgttggtgagaattggaatatggaaatctgcccttttttggtaatagaagaaaatgctaaattagaaggggaaaaaagcttcactcatgaaaacagcccactgattttcagggaggctgtccaagctgggtttgcatgtggtaatcagacattgtgagtgggatttagtcagagggcacagtagccctttgtcagggtggctacatggcccacagtttgccatggcaacaggagactgcccagtgttcttagggaggagaagagtgaaaatggtgcttctgggtgagtagaatggggagcctgtgaggtttggggctggcggttgcaatctcagccatttgtggaattgaagtgaatagctgatcaagttcaataagccctggagtttgaatcagagagaccagtttcaacacatcctaactgtctgaccttattaaacatttgagggtctcagtttatttatctgtaaaatgggtttaacaaccctggctgtcagggctcttattaagaccagtactttcttcccgcggtgacaccatcctgtgcagtctgttaagaaggcttcttgagctcatatgcacttggcaggacttgggatcaggtactgccacagtgggatttagagggcagcagaatttcatgttctcattgtaaaaacaaggtcgctatttactgccttagagacttccttaacatcgccacagcaagtaacctaagggaccagtcccaaaagggtggctaaattagaattacccacctttacataaaagaccaggaaatcaatccctccaatcttacattcccattttaatcaattgctacaataaatagagaacatcagccattcattatcacctagattcatcgctaggtggctctgtgtagctcctaaattgaactattttcattcgttcctcatctccccaattttttcactctgtcctctcaaattcatcatctctcatctatatcctcaaattcttcctttgatgcttctctttatctttcttttccaaagggaaaaatggtagaccagaggctctaaggcatactgcagccctcacaaatggtaggttttccttccacatctctagttccctaaggtaggcattttctttactatttcccaacaattctctcctttctcaaaaattaataactgcattgaaaagcataccatcaggctattcttcccacttttgttttggtcatcagccatctcccaagttgcttctccagatggattgaacagtccagctcctacattactgcctttcttttcaagactacttctgtcattatagtgacctcttaaacatctactcacgtagtttaaccttgaactttgtcattgctggtaattgtgcgttttcaagattttgatttcaagctttctacctctgaccatctccttttgttacacaggaattttgtttgcttaggaacattgtaggataaaaacgcaatgttgctgaagatctcactttaaatataagacaaacatctgaaatgtaccctcatcatcttcaggcatttcctctacatttccccaagtaatccctgctccaattttctagcatgactttgtcacattttatcctctgttttcaaactcccatacccttatcccacctctcaccctcatgggtggcctctacagtgacaaattcaatgatcaattttttttattttcacttattcaacctctaaggaccacttggtcctattaatcatagatttctttttgaaacactttcttaattttgttatagggacagcactccttcctcattctctcctggcatattagtcaggattctctagagggacacaactaacagaatatatgtatatatgaaagggaatttattagaagaattgactcacataatcacaagttaaagtcccatgatagggtgtctgcaagttgaggagaaaggaagccagtggtggatctgtcccaagacctcaaaagtagggaagccaaaggtgcagccttcattctgtggccaaaggcctgagagcccttggcaaaccagtggtgtaagtccaagagtccaaaagctgaagaacttggagtctgatgttcaagggcaggaagcatctagcatgagagaaagatgaaggctggaagatccagcaagtctgctcttccatcttctcctgtctgctttgttctagccacactagcagttaattaggtggtgcccacccagattgagggtggttctgcctctcccagtccactgactcaaatgttaatctcctttggcaacacctcacagacatacccaggaacaatactttgcatccttcaatccaatcaagttgacactcagtattaaccatcacacctggtattccagtatttcctatttccttctaaatctcctttcctggtcttttgtcttctgcttgagcactgagtcatagagtttccaagggtttgatcctcctctcccattgttttccattccttttcctctttgctttcttctcttctctctggtttcttaggtattcccaaccagtcccctgacttgaaatattacctatatgttgctgagccccagatttattctctagcatgggtgtcttctctgagcaccacacctgtatctatatctccttttcatcccacttggatgtctataagaggttgatctacacacaacagacctccagatttctaccaccccaaacttacttcttctccagttttccccttaataggacatgttcaactgataatctggttgctcactttcttcactttgcatatccactccatggataagacccatcagctctctctttgcaccatatccagagctatcttctttcactctcctatcaccccaagtcaagccatttttatataatccttaaaccacagacattttctcccaaattgatatcttcttcttacttccctgtggtcttctcaccagtgtcctaagagtaatcctttgaaaagataaatcaagtcataatactgctctcttagccctttaatagaattccttcaaaagtgggatagaatcccaagccatggtcacatcttgtaagcccctaaacagcatctgacctggtccctctttctgagcttaccttctgccactctctccttgccttctctgctctagacatgcagactttcttgctgttactcaaatatgccaaactcacccccatccctgaactttatcgttctttctgttggaacattcatttacagaccttcacatggctaattcccttgcttcattaaagtctttgctcctatattaatcctcagagattatttccttgaccaactcataaaacataagactcctcacctccccagccttcatcactttgtgagccctgattcgatttcatttttcttcattacaccctcagtctgtcaccctttccttattagaatacagtctccattagagcagagaccttggtttttgttaagagtgatatactcagtgcctagatcagtgcctgacacattaattgtccccccaaccccaataattgctgaagaatgaatgaatgagtgagtgctatttttaagatcaaaggagagaagataaaccattaatttagtaccatataaagcacataaacatataataggctgtcaataaaatgagagttgaattcatagcacaacagcaccctacagcctttctaccatgacacttatgttttaaaaattttattaacatgtttttgttgagatacagttcacacattatcaaagtcttctttctaaaacatacaattaagtgatttttagttgtttcacaaagctgctcaatcatcactgctatctaagtctagaatatttatgttaccccaaaagaaaatttagtgtccattagcagtcacttgtggcagtctgccacagttactacttgaggccatcactatgacagttactgctgttactacttgagatcatcattacaagactgaacgaaggaggacaaacatagaaatgaaaacttaaaacaaaagaaactgttttaaagaaggggtccggggaagaagaagagggctccttgcttctagtgagcaaaggcagcagcagccctgagcttctacaacccttcatatttattgaggagaaagagcagggaggaggaagtaatgattggtcagttgcttgattgatcacaggttcccattattgctaacaggcctcagatgtgcgtaatcacaagaaacacttgtgactgggtcgtgacagccctcagcattccttctgggtgacagacgcagtttgtcagtttgccagcattctgcatttatgagaacagtttgctgtttactcatatagcctccagtggtatactgagttgatcatgaccctcactcttttggtctccaacagtcactcccatagtacctcttctcagcccttgataatctaataagccactttctgtttctatggagtttgcctattctggctattttatataagtataatagaatcatagaatatgtgcctgtttgtatctggcttctttcacttaccatgatgttttaaaggttcattcacattgtagaatgtatcagtactttggacttttttatagctgaatagtattccattatatgaaaacatatgtccacacataaacttgtacacaaatgtttatcacatagcattacccataatagccaaaaggtgaaacaaaccaatgtttatcaattaatgaatgaattttttatttagggagctgggagctccctaatggcaggaactgtgtcttattcacagttttgtacataagagatgttaggtaaatgtttatgtaatgaataaataaatgcatagctatgactactataataatatgcaataattaactattatattgacaataatgataataacaatattcagaatgatggaaattactgcttgattgaccttgttaggtttctgattctttagatttcagtccatttattaataaaattgggcttatagtgatggttaacatgagatcagggatataatcattattcctatgcataaggttagttccccattgcaatccactttgccagaactgccatatgtgtcataacaacaggcgatcgctgggcatttaagatatgtattactaaccaagagtaaagtttccaccgcttgagaattctgtgtatcaaagttccagttctttaggatgaaaattatacttattctcttggatagtataaagttagttacaaaatgttatgaatctctgaggaaaagttgaggtaatacatattttagaattttaatgtttgttctatgtttttctaatttcaataaaatcactaaatcacaagattcctaagttgaggctatatctttattgttgtgactttagtgacaagcagagtggttagcacttagtaggtacccttttaatgttttacagatgactaaagagacagtatttgatataaaaaggtgtgaacccaatgctccacagattttgttcaaagaaataccagcagcagtgaattgaggcagagccattgaaggaaattacatctctgggacaagagctttttcccagctggacttctttttgaaaaaggggtatgacctcacacacacaggcagaccctcttccactgcaccatggcgaggcaggcagagactcatccacccaggctctgggtgactagcttgctgcaggagcaagccctatcgtgggacatcaattatataagccacagcatttcagactgagggacaaaagtagattatttgtggtggggacagagacagtcattttaagcaatatcttaaatgaaaagccagtcttcgtggctgagctttggggagactaacctcagagccatatggctgttgggaatggggaggctaatttcatctgtaaaatgataggcctggatgagataataatcacttttgtctctcccagccctgaatactctgtggcttctccaagaaactctaatgaggggaatgtagaatcccagaacacccatggccttaggagagccttgagagatctatgcactgccctcagggtactgctgagggttttttgactttttctgtagctgtgtacatccagtttctctctctgtgtgagttcagagcccctcctctgctcactcatgctcacctatgcgcacctctgtgtacacacatgttacctacacaacagagctgtggtccctgagggaggaagattttcagttaagctctagtttccgaagctatctctgtcactgctgtcactggtgtgcttctaaagcagaactctaacttccatctgtaaaattttctatagcatccattgccgttgggttgaagtcgaaatccttgtcactgcacccaagtcccttcaggcagagggcagccaacatcttcaggaccatccctagcacccatttcctcagaatttcttctccagctgaaataaatgattctttccttccttccttccttccttccttccttccttccttcctccctccctcctttcctccctcccttccttcctttttccctccctttccctcctcttttctgcccttcctccccactcatgtcccctcccctctcctcccctcccctcctctcccctcctctcccctcctctcccctccccttccatcccctcccttcccctccccttccttctctccttctctcctctcctttccttcctttccttaccttctttcctttctcttcttccatccctcctttcttttctttttttctttgtttcttccttcctacctaccttcctttcttccctttttcttcacatagattatgtcttctctcacctggagcctttgcaaatattgcttgttttatgctttcacaagaacatgagtgatttttaaatatgtaaatctgaccacaactctctcctgctaaaccctgaatggctccacatcatagttagaataaaattcaaacatctcaccctccctatgtggccttatggaagctggccttgccttccttcttcacacagttttatgtcctctttggcctccctgtaacagccatagtcaccttctttttgtgccaagaacctgctacacctgctctgaaagtcagaatttcatgctagcacttctctttgtctgcaggttattggttcccatcactgcctggctggtttcttttcctctctggtttcaactgaaaaggaacttccttagagaggacttttttgtccacagaatctcaagtagcttatttcccctgaagtctgctttatttccttcatggcacaaataacttgttgatattttgttaataatttatttttggtcagctggctgaagagttgacactataagatcaaaaatcttgtctatctcattcaagactctatccccagtgtctcaaacagttgttcctagaacatactaggtacttaggacttgtttgttgaatgaattaatgaattaattaatgaacaaatgcttgaacatctattactcagcttttcctttctttcacatgaataacttctatgtatcttttagctgcttatttaaacatcacttcctcctggaagcctttccggaccctggaggatgagctagatgatcctcacctgtgttcccttagcagccaaatagatgacgggattggggagattaattgcacctgtaaaatgataggcctggatgagataacaatcactcttatctctcccagccctgaacactctgcggcttctctgagaaaccctatcgaaggggatgtggaatcccagagctactcttgctatcaactcgccgcatgaccttgggaaaatcatttcacctggttcagcaatgatttactgagctattgaaggccttactttccagatccaggtaagattgatgatgctgaagtcttatttcctctcaacttctcgttttccccttgacgatattcttttcaggagcaaaaactgtaacctgtacattgttacattcctggtgcttagctcagttgtgagcagttgagtgattttagaaactcagaataaattatttattctcttgctaaaaatatgacgtgctttctaggtagtcactgtactggcctctatgttaaattctctcaaggaggagaatggagaaccattaatcaaatgcctactaagtgttagtgttttacacaaatattcttcttgtattctcacaaaaggccttaataggagtaaacgctgactccattttataaacgtaggaattgaggctcagaggataattatctggtcgagctagaaaataggagtagtgtcctaactctacaatttctgctctttccactaaaccacggctgtactcccaatggtagggaatgaacaacagggctctcctaataattttattagccattctcaaattaatagctcctctgctggcccctcagaaagggggcttcatttagaagtctagcctcacaagtaagaacaactctggttccaggtacccattgggaagtggctgattgaagccagtgtcactccttgtcaggccccaattggcctgccccttccagtaggtcactcaacgtctgaccccagcagtgttttctagcaactctattctgcccatagataagggaaataaatggagaggcattcatagctggctggtgatgatttgtttgttgaaagaaagggtattggatgcaattctgagtgtactggtgccaggttctttcctccttggcatttaggtaactgccagggcttgtgtctgatcttcatattctccagtctaggcaggaaccagcttggtcaggttgttccctctgctgcttgacaccctgcttgacctctgctgactcatctaccaccctctcttagcatcctcataagttactaatggagttcagggggaagaacagctgccagaaatatgtgggcaaatgaaagtcctacattttaaagacaagttaaagctgaactgttccggataaaccagcagctttgtcttcctgtcggtcctctctaaatactcagtgtaaaaactgctgccttagtgagaactcttcctcactctggaaggagctttctctccttccacagagtctcgcccttggatagttacacgtagtcgtcctttctttttcattgttgatggggacagatgtcagagaaccggggtacaagtcaagacacccgactggaggacctactctagttaccaactcgtggcataaccttgggaaagtcatttcatctctttcaacattgatttactgagccattgagtggttcaaatatgtagtggtacgcattgtaatcttaagacgtttctgactctctctctctttttcttttttccttgggaaggttcttgctctgtcacccaggctggagtgcagtggcatgaccatggctcactgcaaccttcacctttcctgctcttgaactcctgggctcaagcaatccttccaccttgagctcccaaagtgctgagattacaggtgtgagccactgcgcccagctgactttttaattttgctattttaaagctatatgaaaagacagagaaaagtgcccacagtatattaagtaggaaaagcaagttgcagtatagtcattagaatatcatacatttgttcaaatgcatgttttcatatcatgtattgttttcataatttaaaataactaccaatacatcataagcaatctttagtaagtttatcatttgattgctcaatttattccaaagcctgtatgactgtctatttaatattagatgtttgagacacagaaaacacaaaaaaactcattgtcctagaggagcctaaagtttatagaatttatgaggacttatgtttcatttctaaaagattttgggaagtttttctgttgaggttgggctgcctctgtgtctgataactaggaagaacaccaacagctccttttctacaagaggtgtattgttcccattctcttcagtgccacatccttgctttagtgcttccactgaccttgtgcttcctgaactcctacgtaaccttagtttgtgtcagtaatgtagtacttaataatacagcatcttctctccttagcccacctcctcaccatcagctcacctcctcaccatcctttctttccctagcccaccccaatcaggttctgtctgctctgttccactgaaaattttcttgttaaggttacaatgttgaagatgttttgctaaaaaaaaccaaaaggccaaaatccatgcttgcaacaattccaagaaattggtgaattgctgaggatgctgcctttcattctctggtccctgcttacacctgcagtctcacctccactttgcagctttattgtgtctttctcaccaccaaaccttcattcatgctgctctctccctgcctggaatgcccagcttcttcatctccaattagaaaattctcgctcacttttgcagtaaatgcctttctgttttatttctcccaagcctttttttttttttccagtttaggtatcatctatttcttctttccagaggaccctaatttctctttggggaattttatctcccctattgttggcagggataccctgctgatctttaatctaactcatttggtacagtcgtagaatgggcattgacccatgctaggccaactgggctttttcccaggagaatgcataaaatgtatggattcattcatttcagcaggccatctgggtccagatatcaggccatttttgcctccaacaccgtctagtgttacctcttttctatttcaagtctcttttttcgacattgtctcgtggccctcagagctgaccctccgagcttgttcataagctcccaacacatggctttttttcaagttatccaaagttggtttctgctccttgcaattgaacaacaataacaacaacaagaacaagaaaagactgatacattcttctagactcagataagggaataccttctctgcaactttttcaggcttcctcttttgtcccttcattggcctctagttgctctaatagattcctccactgtggcattataactgacctcttctctcctaattatagtctccttttgggggttagagatcatgtctcattccaagttttgttcctagagcctaagacatctttatcttgctggggcccggatcacattcattcaggagtgaatgaagaacctgaaattttgtacctatggggttagtatattctttcttgttgacagagatagcaacctaataggatagttttctctttttaggagctaaaattttatttctgtgtaattatccttgtaagagatttgacaagacctcactaaaggtatgaatgtcctgttccagcaggttctagtcaggaacatggaaagcaaatcagaaatttcaaatagaggggatttagtatagggaatagaccgcatgtattttagaaagttgatgtagcaaacgggatgttgaggtaatccagacatcagtaactgcaggaagtggctgcttctgtcagacagggagaaaaaggagagaaaggtggtgttatgagaacttacacaagtgcaaaggagaaaccctgcatggctgagcctcatacttctggaaggttcctgtgtcttgtgactggtgcttcagcctctgagtgggggcaccctgtggccaggcttagacatcttaaagagtgctcaaagactggaactcaggcctcagggagggcaaatgcttgccagtgctaagaattcggagatgggaactgaaaacttgagttcagacttggtgagccgctcgtgttggtctctaatgaggaatcctgtggcaggtgctgggagtgcgtaaggaagctaaagaacggaaccatagctttcttttcctctggaagcatctaacagggtctgaaataggaagagagtcctcttcatcctgccagcttctagtctcctgtcaatgtcccctgttgcagggctcgaatgggaagtgggctggcaaggagtctgggaagtgtagttttcagaatctcagcttcggtgtcactgagcgtggatgggggtgggaaactttgaggctgagagacactgggtaaataacagacatatgctcttccaggaaaaaaaaaaaaaaaagtagacttggcctccaaggccatgtgatgaaatacagtctccttgttttgtaacctgtttccaacatgattcccaataactctcgagtaagaaattacagcttgggataggacttctgtggaaaaaccctggtgccagtgtaaaaagtgcctccaaagtcaaagcattcctgttagtcccgacacatagagcccatgatttattgtaatttttacttaattctgcctccttctgtaggccctggttccaagaacgtcttttgggcccgatgcctccatggctcagatacttgggaacagcaatttgccataatgtctgctgctcctcaggcctccctgccaaccccctggctgtgtgcagccagccacaccctattcctccagattgcattgctccatgtgttttttcttccttggaaacagaatgccatgtcttaacctatcccatcagcagactctatttctttttttcttcatttttcactactttttgctcatcccttaattctgatgcttggcctatgtccctggattttttttttttttaataacgataatgctcttttcctagaatcttactatataaagagcatcttgtaataacagtgacagtgaaattttttggctccacgaagctttagattactcaagagcttttaaaaatctacaacttcactgattcaatattggggggaaacaggtcatttggattcaattaatgatatttaaatcctgaatctaatttaattagaccacctttatctacttaattcctctgagccttagtttcctctactttaatagagggctaagacctacctctgaagattgctaggaggattaacataagctctgtgctacatctggcacatagtaggacagaataatcttagttctctttcttcaagtgagagtgggtgtggtgctcttatgcatatggagaaaggaggccatataaatctgtcctgagctgtataatggatttcacaataagaacaatgagaaatatctgagcaatgctatttggaggataatttttttttctctgttcctatagaaaaatgggagtgatattatcatcagatgaatttcaattatggactgacttccccaatgtaactttacccctgtacttatctattatttttgtatgtgtgagagagaaaattcggaacaaaagcaccagactgggacaatatggggctgttcctagggagagaatggtggattgtaagacttgaaagttagtcttgtgtcagactatgcagattcctgaatgcctggctaagtagtttccattttatttcttaggcaatagaaagttgaaaccaaaaagggtaaaataaataaatgaataaataaataaagaaccttgtaaaatgaatttgacattttatataatagctcttacttgaggaatgacaggtaacaagattcagaaaaatgtaagatccaaggagattcatctttggtgagaccttttttttctttaaaggactttaggaaagacatacttaaagtaagtgctagtagatgaggtgttcctttcattttattttccattttttcattcacataaatcatgacttgtcattgtttgcttcaaacacaggagagattttacctgtgggtttattctgttagaatttgtctatttgttgtagagcaggatcattgctgcatttgctaacattctgggtgaggagaaagatgcataaagagatcagggtaaccaacatggtaagcctaatgacaaccacaggcagatatgagtccctcaaggggggaatttagggcttcaggaaaagctttctgaaaacatgcacacaacaacagaaaaagatgagcgagccaagtcttagggaatgaggagtcatcatccatgtggaggaagaacagagggcaccacaatccacatggaggaacaatctgagcaagtgcacagagataagacacaccacactacctgaggacactacaagcaatttgtgattctggagggtagcaaagcagagagagtgaggagagaggagctgaggagtaaggcaggaccaggaggaagaagttcttgtgtgctcagccaagaaggttacactttatcctgccagtgatgtggagatgttaaaggtctctgagcaggtgagtgacactgtagaatttgttttattctgttctggtggctgcataaaagaaggaaaaagatgataggagagagaccagattggaggcattgacaataacctatgtaggcatgggaggcaaggactactgggggccaccatggagtatgaaactagggtctgtgggagttgatgactgagtgaaacagggaggtaagacatactgaatgacgatgagtctggccatgatgactggtgaacgaggttaccaacaccaaaacaaggaacacaaaaggaggttccatttggggagaaagacaatatgttaggcttaggaaaggatgggtttgaggtgccttgagaatgtagaaaactatactcctaaatcaacaggcagtaattggtagaccttgggtaactcattttatcctctgagcctcaatggactcatccttttagaaggacacaataatatctagtttccagggaaagatcaatttgcccagtgaactcaaagggttgcttttatcaaactcttttcattagcaccatctttacattaatttataaggaagaaacaaacaaacttctctttctaaaattgaccacttctcccttctgagccaaggatgctctgttagtcatcttaagcttcagaagtttttctaccctttaggactggcctttgagctttatatgtgtccatgtgtaatattctttctgtttagtcttcatatcaaggtgacaggttacagcatgaaggtcctggggtggatatatcctttttgagaatacatatcaacaaattcaaaagtctggagaagtaaaggtgattcagaaagtattttgaaatttgtgaaagttttccaaataatcttcatatttatttatcccatatcatatttccaaaagttgtaaaatgaattttactgttaaatattttgtccttcttttccaaaataatgataaatagctttctcatctctgtaaaagccatctattttggactcaaagcttccttggactcaaagtttcctttttatttattttttcagtggcaggacatgaaggggacagagcgaaaaccctcagcccacatttactactagtaagccatgaaataaacaagtcctgaccatccttaccacatgttttcttggaacaaaagggatgtgggtatgacagatccaacttttgctatgaactgtgaactagcatatttttaacttggcttctgaggttggtgaaggaaactttcttgtcctttgctaataaaatgcagatggttcttcttccaaagttcctaaatccccaaagtctgaatctcatcttcttcaaggataagaatagatttgtaattcagtaagcctcaatgggcatcatcaccattcttccttccagatagctttttaaagtgcttgacatataataagtattcactaaatatgtattgaatgagtatataagaagacattgccaggcgcggtgggtcacgcctgtaatctcagcactttgggaggccgaggtggatggatcatgaggtcaggagctcaagaccaccctggccaacacagtgaaaccccatttctactaaaaatacaaaaaattagctgggcgtggtggcaggcgactgtaatcccaactactcaggaggctgtggcaggagaatcacttgaacctgaagcagggcggaggttgcagtgagcggagatcacgctacagcactccagcctgggcgacagtgtgagactcggtctcaacaagaaacaaaacaaacaaacaaaaaaagccacattatcagtaagcttagagtctgagctcttagtgtaaatcctggcattgcaggccattatcaagaatgggagaaattactgggcaccatattagaagaaagaccttgaagtcagttaggtcaggattaggatcctggttccacctgtcctaggcacatgtagggaggagttgggtcaaaaaacatagctgctctgagactccatatggtgtagtggttaaacatcagggcttttaatttgaatactggttctgtcataaattatctagaggaccttgggccatttactcaaacgtctttgttttttgacctttaagtggagagaataattgtacctattgttataagtttgctgtgaggatttatgagttaatatacacaaagcacttcagtagagcatgggacacagtaaggactttgtatgagttaactattattctgttatttttattctactacctcgtgctactacagagtgctactctgtgagaatgtacacttcttttcctatggacaggttccatagttttcaacatcatgatagtggtattgaggcagtcatttaacctcagccacttcgggttttagttttcagacatgccaatgagacaatgcttcctatccctgctggatagataaagcataggctttttgtgaggcgcaaataagattgcaaatgtgaaaacacttagctgactctcaaatgctctataaatgtgagtttattagttggaactctttctactacaagtgacaaaaattcaactcaaatcagcttatgccaaaaaaataatttattggttcttgcagctggattctagggtagctcaaagacttgaaggaagaactttaagaactaggacattgggaacccaaattgatggccattgtaactggaatacacagtttatacctatctgttatctctgatggctgcattctcctctacacagccctctttgcacgtaatgaggaagatagcaccagaaacctcgcttcatattactttaggattccaagccagcaatatatatatatagcaatatatatatatagcaatatatatatatatatatagcaatatatatatatatgattaatttaatctcccttctaaccttggattgattgttgggtacatattaaatggaaaggattgtggcccaacttttttagcccttggtcacaactctttccatttaatatgcaaagaggaatatattaccagaagaagaaataaagaggaaaaaaggtactgggaagattttttttaaaaattactctcatagattatcactactaacattggtttctttaacttctgtagagatgactacaatgaacctctctgtgtaagtgaaagactagattaaatatactccaagcccttgagtgttttcaaatttctggccgagacaggttatcaaaatattgatcccattagaagttgtctttgtaaaagaggaatcctacccacagagtggtcttaacctttgaactattgaccttttgggctggaaagttctttgttgtggaggactgtcctgcacatcctaggatatttacagcattcctggcctgaagatgccagtagtaacttctccctctctatgataacccaaaatgtttttaaacattgacaatatcccctaagggacacgccttcccacccctgcctttgagaataattgtactagtggaacacagctaagcagtaattcatacttctctattctccactcttattccaaaatgatgggtgtaatgctggccagctagactggttttataactttttaaccttcctttgttccctctctacacatttcattacactgaactaccccaccaatggacatttgaaaggtcatattgttgaaaaagactgcagggcacgtgactcaggatattttgggtactagtccttcttctgccactgacttggggtgtgtagctgggcatctctttcctctctgggccttggatttccatattggcaaaaactgaaagatgtcctgtaatttttcgtgttactctagcatttatgatacaattggatgagatatgaactatgaaatgggaaatcaccctacatatttcattagttgaatagtttgtgattaagagtctaagtttctcacaagcatctcttttgtttcttggaagttaagatcgcacctggttgcttgggatgtacagggagtctgggcaaaagcaaggataggtgtattagtctcttatcatgctgctaataaagacatacttaagactgggtaatttataaaggaaaggaggtttaattgactcacagttcagcatggctgggaggcctcaggaaacttacaatcatggctgaaggggaagcaaacacatccttcttcacatggtggcaggaagagaagtgagtgagtaaaagggagaaaagccccttataaccccatcagaccttgtgagaactcattatcatgagaatgtcatggagggtaaccacctccatgataaaattaccttctattggttccttccatgacatgtggagattatggaaactacaattcaagatgagatttgggtggggacacagccaaacaatatcaatgtgcttatagcagggtctttgctgctacttgatgttttgtctctgaagattccatctgtggctagaaaaaacagtatgaagtggaaaaccattcactgatactgaagcataatgtatgaggggctggaatagtaagaaatacagtagaggactgtgcagggccttggatgccagggtaatggacacaacactgatacccaaagaggggggtaaggtagaatgcataatggaacaaatatccatgtaactgggtgaattatttctcatctttatgtttaaagttcagaaagatggtagagtagaattagccagatgcattttggagtagataatagtttgctgcctctttatttttcccatcaaaattaaatggcttccaatattcacataattgagaaaactgaggctcaaaaaggaggagtttacaactccacagtgatcacattgtgagttagtggcagagtggagacagccagccaggcctcagaacaccctcctcttgccttatataattcaataaaaggagacacattgatgctggtttttccatcttgctttcctatacctccccattcttgggagggtttttcactaagatttcagtattattgttgccatttactcctagctagaggcatcagaactaataaggtctagaacagagttcatggagcaaatgtctcctctctacttggctgaaaaaaaaaacaaaaggaaaggaatgaagatgtcagttgtgttttcagaatgagctttccagcagatggagatgggaacctatatatatttttctaacactatcttctagtttctagttcctgtattagtttccagtgcccaccataacaaattactacaaatttcatggcttaaaacaagagaaatttattatctcaggtcctggaggccagaagtgtgaaattactgttccttgtctctcccagcttccagtggttcccaggtgttccttggctttggccagatcattccaatctatacctctatggtcatccttcctcctttttttctctgtgtgccttttataaagacacttgtcactgtattaagcgtccagtcagataatctagaatgatctcttaatcttgacagcttcaatttaattacatctgcaaagaaccttccccaaataaggtaacaatcacagattttgagtattaggacatagatatatgcttctggacaccaccatttaatccactacacacaggaactgtatgtacagtgtctcatcagctcctcacaagtctgtgagttgtggatatatataagcattggcttttgttgttaaattcattttaggatgaaaacatgcagaaaagaagggtttttttttttttttttttttgagacagagttttcctctgtcacccaggctggagtgtaatggcttgatctcagctcactgcaacctccacctccctggatcaagtgattctcctgactcagcttcccaagtagctgaaattacaggtgcccaccaccccacccagctaatttttgtattttagtagagatgacatttcacaatgttgaccaggctggtctccaactctcggcctcctaggaggccctatctttagaggacatatatacagatacactatgttgaataggggattcccattagggtattgagtttgacccaattattattctcttaacggtttaaaggaaccttgactcaactctgaccccgtctctatttagctgtgaataatttttaatgagtctgtttgcctcttgctcctcagattttccaagtgtgaaacgagcaatctgaactatgagctctcacttagtttatgagtcaaaccttccatcaaaatcagtcctgaagaccaaggttttgaaggaataatgccatctttacaagtgtaacttttgctgaaaatattcaaactcttcccactacgactcaactagtgatacaaaatccaattgctaggaagctttaggattcaccctggtgaggaccatcttccctgaaatactcttttcttctaggctatacctcttatttcaccttcaaaacccatcttaagtattcctccttccctgatcttcctaggcaaaattcactaatcttaccatcccctttcccctcccctcaatactttatgttgtgcatgcttgaatagtgacacttatctttatatataattattcctttttcttatctcactcttctaaagtgtgagtaaatgcatgaggtactcttaatattctttgagaagatgtcaagatgaggaacctacactctcacttttcttcttgatagttgattggaagagtgccagagctgttagaggaagaaagtctgagttagtgaaatacagaagacattttttaaaagaagtctagtgctgtttttcctttgtgaaagaaattgcttctttgtttttttcctcttgtctttgctttccctcatccttttctttctgttttttaccgtttattttcatcctctatcaaacatgcatgctgagctctaactaatttgcagttactcctacgcctaaagataaagagataaataagccactgtcctgccatcgaatagctcatagtctcatggccaagatagttgaggaaataattacagcacatcatactatatcatatcatttcatatatgacatatatactagttaacatggtacaatcattgtattacatatttttacatataattttaatctataatatgtaccatattatacactacaaggaggatgtgccaatgctttagcagtcctcctcctggctttaggagaagccatatagaaaatgtgttagaaaatgaatgtcttcatcagacaaaaaaaggaaatttagaatggagcacactcaaaatctcagagactgtgaacttgaaaagcaaacccaggcagatatatgataatcaaataaaattttctatgtccacttttttcatggaagagctatttttaaggcttacttgggggttccagttcccacggtagatgttgtacctccactagctctgcaagacagtgggctgtgccaacatcatcatctgcctaccattcagatctccatccaaagcagacagcaggatactagcaagctgagactgagcatatcacccttctccctgaacactcagcctagtttgcattagtccccttctctgctacttcagactccacagaaaccatgtgtctttccattgcaaagttaatttgcaaaacactcaataaacttctaattttattttattttcctgggatctgatgttgcaaataaaagaaaattataaaatgggggcaattactgattgggctgttattgattactgtgttattttaataccaccaatagccattaattatcaggtcataaaggtacaaagcataagctgatttatcataatatccctgtatctttgactgtgcttggcataaattaggtaaccagtaaatgagaattaaattcagttgagcaagtttgaaggattaaatgaagcaggcattattcattttctttatatatcagaaatggatcagaatttaaccaagaagggagctgacattccccttgtggtgtgctagttagtccaggagctatttcttatggtacgaaacacacatactctcctgttggggtgtttctgtggctgacttgatggaggtctgcgtgcatgacctttctcttttcagccctcctctcctgcattgcatcttacttcatgctactgactataaaatctttctgaaatgcagattagatcacctgtccaagattctgtttattttcataccatttgtgatggttaatactgagtgtcaacttgattggattgaaggatgtaaagtattgttgctgggggggtgtctgtgagggtgttgacaaaggagattaacatttgagtcagtagggtgggaaaggcagacccatccttaatctgggtgggtaccatctaattagctgccagcatggctagaatataaagcaggcagaaaaatgtgaaaagactggcctggcctagcctcccagcctacatctttctcccatgctgtatgcttcctgttctcaaacactggacttcacgttcttcagctttggggcttggactggcttccttgctcctcagcttgcagacagacggcctattgtgggaccttgtaatcgtgtgagttaatgctacttaataaactcccatatatataggatatatatatatatataaaatagaatatatatatatcctattatatatagatatatatataaaatgggatatatgtatataggatatatgtgtatatcctatatatatatacataaatatatcctattagtctgtccctctagaggaccctgactaatacacgatttaagaaaattgtagtgagaacacttaacatgagatctatccttatacgaaatctttaagtgcacagtacagtattgttaattataggcataatgtttacagcagatatctagaacatttgtcttacatagctgaaagcctatactcactgaacacaactcatttctcctctctggcccctcacagccaccatttggttgtctgtttctatgagttttactattttagatctctcacagaattagaatcatgcagtatttgtccatttgtgactggattattttacttagcttcagtgactggattattttacttggctttacagagtttattcatgttattgtatatggcaggatttatttctttttttaaggctgaataatattccggtgtgtgtgtgtgtgtgtatgcaaatatacgtatttttaaggctgaatatttcattgtgtctgtgaacacacacacacatacacatatatagacatttaggctatttcttggctactgaataatggcttgaataacatatattagcttgaataaatgctgcaatagatatggaagtgtatatatttctttcagatcttaattttaattcttttggatatatacctagaagtgagagggctaggccacatagtaattccatgtttaattttttgagggaacttcacactattttccacagcaactgcaccatttttacattcccaacagtgtacaagggttccaatttctctatattcttgccaacatttatcttttttctgataatagacattctaatagttgatattttattgtacttttgattgcattctctgatgattaatgatagtgagcatgttttcatatacctattggccatttgtatgtcatctttggagaaatgtctactcaagtcctttgcccatttttaaatcgttatttatttatttattttgctattgagttgtttgagtttcttacatatcttagatataaataccttgtcagatctttggtttgcaaatattttctcccattctgtatgttgcctttttactctgttgattgtttctttcgctgtgcagaagattttagttcagtctcacttgtttgattttgcttttgttgcttgcgcttttgatgtcacgtccaaaaaattattgccaagtccaaggtcatgaagcttttccccttcatgttttcttttaggcattttatggctccaggtcttaggtttcaatctttaatgcatgtttagttgattttatggtctcacttctgcctgggcctaagccccacccctcagacataagcatactctacacctgcatggctgggcagccctcaaatatgccttgggttttctcgatccttcatggctgcacatgtaccgtgttccaggaagatacctgttcaccatttctccatttgtttgacttttttttttttaaagcccatctcagacctgactacctcatggaggctttccctgaaagcccatggcttgattagggaatcactcttccttttttcatagcctgtgttttctctattggtcatgtgtgtgctgttttcttcaattcaactctgagttccatgaggataaagataatgtccttgttcttggtaacattctcatttctaatcataggacctagcatctactagttgctcaattcataggaaggaaggaagaaggaaggaaggaaagaagaaaggagaaaggaagaaggaaggaaggaaagaagaaaggagaaaggaggaaaggaaggaagagagaacatagagggacagttatcaccaaatggcagcagaagaccatttggtgatatgaccatcctagaggaaaaaaagtgggcacagggattgctacactctgaatgtttgtgtccccctaaaattgatatgttgaaagctaatccccagtgtgatggtatttggaagtggggcttctgggaggcgattagatcattaaggtggagccctcataaatgagattaatgtcctttttcatggtgatatggttaagttcagcaagaattattttatgtataagctcttcagaaagaatttgcaacagctgcccactatctggctttggaggatcaaggatgtgtggctactcagctactccataaacattctagggagctaaagaggaatttgctgttcaccctggaagccagtgggttgcttttgtttgttgtgtctctgctgccatgactcccagatgacaccccatctacataaatgttgcagcaaacagagatggagccaccaggtggattttttcaaccccaagaacctcagcaaaccagcagctgacaatgactgagagtgggccccaaacacaggggaaggaatgtggatctgtctcgatctgcctcatgtgaggggaaatgataaagaaggagtcataacagactggcagcaactcaagtatttggcactaaaggcctcttccaaagaatcattttcaaagatgggtctgcacccctgcagaagttctcatgtttctataaatgctatgcttgtctttctttcttttttctttatctttctttctttttctcttttaaaaaattttctggtctttcagtgtaaagaattagaagggccaggtctcaggcatcaggtaaagactggaaaaaaatatataaggatgtgaagcaagcacccctttggagaaacagcaggtctgtctggaaggtgtccttctgccctcagggaccttctctttatgccagcaatgccaggcccactgagttcttcccacttaccttggtgttgacccgatgcctgaattccccatcactttttccaaatggctttccatctcttctcttctcttgactataccctggggaaaagatgctctttgggcttctctttctactttataaagtaattccctgctgacaacagagtataaccatacattcttgcctgactttccttcaaagtcatgtctaccttcctctcatgctcttgactttttattcattaatttcctcatttcttctgtgtctgtctccacctgttccctggatcttcagcttgcagggatccccttgtttatcacaattaaggtatacattggcttaaaaccctattctacagatggtgggatctcaatgtcctataatgttctatgaggactccagggattccggccctggttcaggtctctcttattctccatctcttcacttctcccactgccattcatcaatgattggcaaacatttccttttaatttattttccccaaactcaaagataataattgtggatagcagacttttactgacaatccaacatcagagtatgcatgtaaaagtgtgcaactttacagctgatcatggaaattatttcagctcagcctgcattcttactatttctcttcctccttctctcttttctagtactttaaacctccttctccaatattgtggtttatttcctgggtaaaactgtttaactgttttatcctagccctcgccagtgccacttttaaataacaaaataacccatgagagatttttgctacttaaaggccattctctcccttaagtacagtttaatcactagatattagtctaacagctttctgtactatacatttgctcagtcgacaaatggccttagtgactatggatgtgaaaaaggaaagattcccacttttctcctgtagttcgatgctttacattatagcttctttcaagtcttgagagcaggtgccacatttcatttgtttttatattgctggtgcctagtatcatacctagtatgcattgacaatatgcagtaaatgttttatggcaaagtggtttcaggtattgtcattaggcacctttaagaggtgggaagatgagactcagaaaacttatgtcgtgaagtcttaatcatagagtaaatggcagagataggtctggaaacacccaaatgttcagacaccaaatatcaaactttttcttctctatcatattagtggcatgtttcccatgaataataatttattttttcagattttacacatatgcaaaattgttcctttcaggctgattacccatccctacaggttcatcccccactgcatttgtgtgagaatgggtggtgggcaattgttgagggagggcacatgcagagcccattcttggccctcactcaggtaccaggtgctccagccatcgttacagctgactgctgaagaagctactgtaagtcagttcaaagagtttctgggctcttttttacacagtcagtccttgaaggcacaaactgggccatagcagcagaaaatgaccatcctaaaggaaaaacaaatgggcacaagggattgctacagtctgaatgtctgtgtcctcctaaaatttgtatgttgaaacctaatccccaatgtgatggtatttggaagtggggcgtctgggaagtgactagatcattaaggtggagcccttataaaagggattagtgcccttataaaagagatcccaaagaacttcttcatccccactactatgtgaggactcagggagaaattgttatttctaggaaccagaaagtgggttctcaccaaacaccaaatcttctggcaccttgatcttgaacttgccagcctccagaactgtaataaataaatttctattgtttataagctaccttgtttatggtattttgttaagcaacccaaactgagacaataatgttgcccagtatatcagttttctattgttatgttacaaatcaccacaaatttaacagctaacatataacacaattatctcatagtttctgtggattagaagtgtaagcaaagacttagttagttctctgcttaaggtctagatcttaagccaacagctttttgcaccatacatttactcagtaaacaaaaactgactacccttgagtatgatatcctaggccctactgactatagaggtgcaaaaggaaagattcccactctgcaatcaaagtgtcggctgggctgtgttttcatctgaaagtttgactggagaagaatcaatgtccaaccccattcaggttgttagcagtattcctttctttgtggctgttcagctgagggttttagcattgtggcagctatcagtatatttaaatttcttctttctggattattttaacttccatttcaatgaaaacaatataaaaatattccttaagtataagtagtaaaaattactcaaaaatcatatgggcattaattttgaagtaggtattttactatgaaattcaatctgaataagaatgttggaaatctttcctgtggaaataatgatcaaaatagtatcaagatgaattgatattttttttctttagcatacgaacccataaattgaactgaattcaggagaattgcttgggcttaattagaaaatcccaggtcttcagtaagtgctactttatgacttcatgtacttccctaacaatacccttctctcctctcctgtaacccctatgtcttctctttcccccatttatgggacttctactgctctgtatcattcaccaaatctcttgtatggcctgaattaattatttgagaagtcctgaagacttggttggggactaggtcccaaatattccaactcctaaaggctcaattcagctcaaagcatgcttacttggaattgggtatatcagaattccagaaacttaatgtaatttttaagatgaaaaggctgtatttaaatagttgtaaatagtttgctcttttctggagtagagatgtggacttgctttaggaggagcagactgtgccttttgcttctgtttgcagagggacttcattgtaggctcttgcagtcatctaggtcatgagtcaacaaactttctataaaggaccagatagaaaatatgttatgttaggctttgcagtccaggtggtctctgtcacaactactcagcacttcattatagcatgaaagtagacctagacaatatgtaaaccaaaaagcatggctgttattacaacaaaactttatggacactgccatttgaattttatatgattttcataggtcatgaaattttattatttttttgacctttgttcaatgattgaaaaatgcttaaacttttcttggcttgcagaccataaaaaatcaggcagcaggctggatttagtccctggggtatagttagtcaacttctgttataaatacaaagcaagcacctaccccttgttttttgggaaaaaaaaaaaaagtctctcccccatcccgttggaagtcatttagggctgcattcagagttacagggatctcaggagagctggggagaagagaactgtctctgaggttgggctttcaaaataactgcttgctatatttggaggcagcagccaaaagaagagccttatagactcccagcccattgcagccacgtggaggacagctgggcccagccaatctaggattgcagtgatctcatgggcaggtgagggggctgtacaggaagattacgaagggtaacagctgccacttgagtgaaatcatctcagtagagcaaggggcgacctgtagaagaacagatggctgtctggagatacatgcctggtttatacaaaaggcgacaaccaagagagagttgtggaaaattttaaagtgtcatgaagattcccagggatattttgtgaagtgtggtgcagcactggtaaaagaatgaattttcattgagtagcttgaggaataatgcacctataatttggacgcccaaagaagtgtagggtctgacttctgaggtctgagatgtatgttatcataaacacttttggtttccaagcaacatctgtatctctattcttcattctgtttttttttttttaactttctactttgaaaaaatttaaactcttcagaaaagttgaaaaataatccaaaaacctcccatattcccttcatccagattcctcaattgttaacaattttccacttctttttctagcattctctctgttttgtacatacccaactgcacatatactattttttctgagccatttgcaaataagttacatcagtttatagttcttaaaaacaaggatattctcctgcataacgccagtacaaccatcaaaatcaggaagttagcattgacccaataatgctgcctgatgcatacatccagttgaaatttctgttgtccccataatgtcctttatatgtcttggatccattccagtaacgtgttgatttagttgccatgtctttttactctcttttagtctgaaagaattctttagtctttccttttctttcatgactgacatttttaaacagagcagaattgttactttgttaaatgtttctcagtataggtttgtataatgattcttcaagatctatgagctttttatagaaatattagccaaatattcttctcatggcatcatattgttaagtaccaaatgctaatttgtaccattactggagatattaacttttatcacttggttaaaaggtgtctataaggtttctctactatgaggttagctaataggtattttgtactcatcaattaatgattaataagattgcattttgtgggtaaattcatgtcttctactgtaagttggagcttttccttctatcctatgtatttatactggtatagatgaatggatttcttttttaactcaatggattatagcctgtaaatatcgttcctcattttgatactcaaattgttctagacttgaccagtggtgcctttcaaactggctccagtggcgtctccacctgttaccatcattcattcagcaattccttggtttatcatacaacagaacattccaggtgtcttgtattagtctgttctcgcacttctataaagaaatacccgagactgggtaattgataaagaaacgaggtttaattggctcccagttctgcaggctgtacaggaagcatgaggctggcatttgctcaggaagtgtataatcatggtagaaggcaaacggggagccagcacttcatatggccggagcaggaggaagagaagcagggaggtgctacacacgtttgaaccaccagatatcgtgagaactctgtcactatacagtaccaagaggggatggtgctaaaccattgataagaactctaccccatgatccaatcacctcccaccaggctgcacctccaacagtggggatacaattgaacatgagatttgggtggggacacagatccaaaccatatcacttatcttgataagtgactttcctttcttcagctctggaaccatcaatactctttagttgttcctctactttatgtaatctttattttatgtattattttacatattactttatgtaatatgtaaaattattttacattttacattattttacatattactttatgtaatcattattttagtagagaagcatatacagaaagcaagaaccaagactgcccattgggtgaggggtgccagtgtttctaggtacttttaataagcagatctagaacacccacacacagagcacatacagacacacacacacaggcatacagttacagacacagatacacagacacatacacagacaggcagagaacacacagacaggcagagcacacatagacacatatacagacatacatagatacagacacacacacagacccacagacccacaaacatgcacagacacacacacaggcacagacacatacaaacatacacacagatgtacacatacacagacacacagatacacacacctgagccagaactgtagcattgaatcaaagatagagcctgttctatcttttgaccctcaattatttgtatcagtacattttctttttaatgaagccaatttgaatggggttttctgttatttgctgatgaaagcaacctaactgataaacacagataatggttatatgcaccaggctcagttctcagaagctggaatacagagataaataagcctaatgagatcaaattaaatattataataaattctatgataaggaagacacaagacacagtataagctcagaggaagtctgcgtgaggtattgcctaaactagccagaagtttgctatacatagacatcacagaagaaggagaagccattatagacaaagaattcggtgcaaagacttggaatgccaaaagctgaaggagggtggtgatagaggtgttcatgtttgaataaaaagtatgagtcgttaatttaataatgatacatatgttggtcatatatgggtgctgtaaagatatctctgctgactgtatggggataaatatgtccagaggttatggggaattgagataaaaggctaaattcttccagggcaggaggaattcaaagttataaattcattcctctgaaatgcctcttcttgtgagaatggattgtggtgtgcgccctacttctctgaagagtatgctgagtttgattcatgaacctgaataattttcttaattttactgacaacactgtgtattggacatgatagcagaggccaggaagctgtctgtctcaagacctgaggctgtttactcctttaatccaagatggcagatatgcctacacatgagttctcttcaactaagtcgtagaacacaatctcctgggccaaaactcaatcattctctgaaatagcatctctgctctgtggattctttctgccactccagaattggtctcttcccagtgacacagatctggtgcagttttgatatgatgttggcagttgcaacttttgggaaaaggcaataagaatctgtctgcttagtgatctccataaaaacctagagcaccagtcatgtcactatattgcttaactaattttaaagaaaatttagcttgtatcattttaattaaaatccaacaagaggacaagacccaataaaagaaagaaaaggggcaaattttggaaagaaaggcataatcattattttaggttataagatatatctacaaaatcagaaagaactaacaaaaataatattgaaatagagaaggcaatttagaaagtagtctacatacaagataagtagagtaagaaccaattaagtatcagcattaagaagatagaacatttaataatatactgtacatcaaaaaacaaaataaaattattgatgaagagatataaactgtccagcaaccttaccttccttcagacaaccaaatgtcattgtcaactgaactgaattgagcatgaaggctaacaattatttagcatacactgtaactctttttgttgccaagtactcttagaacttgtaccatgattctcccaggaatccttatggtatatactacaagccctgctatggcttgaatgtgtcttccaaagttggaatttaatctccaagttgttgtaaacttaatctccaatgcaacagtgttgggaggtgcagcctactaagaggtggttaggatatgaggtctctggcttcgtgaatagattgattttatcattgcagcagtgagtttgttatggtcccagtaggttgttgtgaaagtgagtccagcccctttttactttctcactctcttgcaagctcttaccatttcaccttccaccatgagataatgtaccaaaaaggccctcaccagatactggaccctcaaatatggacatcccagcctccagaaataggagaaataaatggattttctttataaaatatacagtctgtgatattctgttatagcaacaaaaactggactaagacaagtcccattccgcatataagaaaattgagacacaagagagtctcgagatcatacagctagtaaatggcagcatggaattaaaatcctgtctgcttaactcaaaattcatagtatttttttataataacatgctctagattgagttttcagttgtcaaattatctccttaagtgaaagttgttctttttttatgagaaaacacaaactgctatcttccaccctggctcttttatatttgtaggtcaacattttttatatttggcttccatgcagttttctctctagtcccacaggtgaaacactccaatccatagtcagtactctatatctagtttgatttagaatagctgatacttgtagcccgggtgtggtggctgatgcctgtaatcccagcaatttgggaggccaaggtgtgtggattacttgaagtcaggagttcgagaccagcctggccaatatagtaaaaccccatttctactaaaaacacaaaaaattagccaggtatggtggtgcacagctgcaatctcagctactcgggaggctgaggcactcgggaggctgaggcacaagaattgcttgaacctgggaggtggaggttgtagtgagcctagatcaggtcattgcacttcagcctgggtgacagagcaagactctgtctcaaaaagaaaaaaaaagaatagatgatacattagatgatacatgtatagcgaaaacaaaaatgtagcaatattattttaaaattagttcctttgttttaaaagttaaatgtagagaatttgtggcattttgtcttggttgttcaaattaaaacttgaaagagacggaggaggaattgtggaggtcctgttgattggattaaatgtccttactagagtgaagttctcatagagcattccccagctgtgactttccaaatgttacggccttattaatcaatgtcatcttccatatcaaaagtccaaatgcttccttcctgctttgtattaaaattttctccagggattggatctttccattatccttccttctgaagaatgtgtctatgtataactggcaagagaacatgggggagtctttctgaaactttgtggcttctgcctaaaataatttattcaaaatgttttgggaaattattctacagattcttttaaatggagaaataatacaaagtccaaaaattgccttggtttggggataccggcttttaaaaagatctcattattccttcttttggtgattagtatttcgtgcttggtgggttaagaataaatgagctggaaataccgttgttttagtccattttgtgctgctataacaaaatacctgagaaaggataatttataaagtaaaggaattcgtcataattctggaggctgggaagtccaagactgaggggctgcatctggtgagggccatcttattgcatcataacgtgatggaaagcatcacacagtgagtgaactcatgtaagagagaaagggaggtctgaactaacttttataacaaatccattttggtgataatgaacccacttccacaataacaacattaatcccttcatgaaggcagatccttcatgacctgatacctcttagaggtctcaccctgaaacactgttacatttgggctagtttccaacatgcgaattttataggacacattcaaaccatagcaaccattaatgggtatatattggtgaggtttctgatatgaatagcaaatatgatatgtgtattagtccattctcacattgctataaagaactacccgaaactgggtaatttataaaggagagaggtttaattgactcacagttctgcatggctggggaggcctcaggaaacttacaatcatggtggaaggagaagcaaacatgtccttcttcacgtaatggcaggaagaaatgctgagcaaaaggggaaaaatccccttataaaaccatcagatctaataagaagtcactcactatcatgagaaaagcagcatgggggtaaccacccctatgattcaattacctccccaccaggttcctcccacaacatgtagaaattatggaaactgcaattcaacatgagatttgggtgggtacacagccaaaccatatcaatatgatatagtagaaagaacatagggttggaattgcatataactttattcaatatctggatctctcacttatgaaatgtacaaaacagttacatagatgcttttgtttgcaaatgatatatagagtaagaaaaaataatttttccattagatttgctgttcaacacttcacatgcttttatttctcccttgaaggtcttccccttcttatatactcagataatgtttgcttagtcttttaagcttaattcaatatttatttcctctgtgatgacttcaactattcctctcccccaggaagaatgggtattctctctctgactcccagattacttcacactattgtaaatatcacactaaactggaataatttatcttcccagatgtatccctagttagactctgccaagattggtcttcatatccacaatgcccagcctagtgcctgatatcctgtaagtgttcaaaagtgtttgttttgatatactgggcctatataaatagagtcattttcagaataaatttactattgcctgaattttctggataattttgccaattagtcattggtgattgaatcacagagtcaaatgctagaatgccagatctgactcatccaactcatcatttctgttccatctttatagttatcatcatatccacctatcccctccattggtattaatattttcttatgttgagaaaataacataaaaacttaagaacaactgtaaaaactgaattactttacattcattctaagaacttatgtgacatcaagtgtatgagatgataattatcttctagtgcacattacaataatttataactgctgaaatgtttagaagtttgtccatgtagtacccataaacattttacatattgccagtgaaacacagagtgtttcccaaagaaacacttagctttgggtctttcttacttacaagtgaggactttacatgttcagagaaataaatgtctaacctgtggtctcacagctgcagatcctggacaaaaatcttcgtcttcttagctggccttcaatgacagttttatgaattaagccaaatatgtacatttccttggttcctcagcactttgaacagcctttgtcattgcttcaggcttttgagggtagggtgaaagcaagacactacacagctccctgcctgtgccctagcaaccaagcacaacacagatggccagcctggcaatctgcccagcagacactgattgcatacctggtggtaagacacaatggtgtttgcacagtgtggttggcatttatagtgataggcaatgaagactgcatcctgtgccttcaggccagtttgctggtttccagaccagaggcaataactttccactagtgtaatgacaacttgtctcttgcagctggatcatgttaggagagtaggaattttatttttgctcccttttcaatggtgccttgtaataatagggtagtattttcccaatatgtttcttgccagttgtacacatgtattggctcctgaagccctgaacattcattggcatcaaagaatgggaatggtccctatttataggagagcagtccccattctacaggtgaagagaatacaccttataccaatccaagaagcatttattatatgcctgttattatttgttaaattgagtgaatgactattgtgtataagccattctaccaggccttgggcatagaaagatacataacataagcatgactcaagaggcactcagaccagtagatgtgacagacatttaaactaataacatgatgagtggtctaatagaggggtgtacctagcactgtgggaacacaaaggagggggctgttaatccttcctagaggttaaaaatgaaagctaaattgatgctgaacactgcatccagggatatgcattatggcaagttggtgagagctcttgttctgctgcctcacgaatctgtgttcaagttcccactttgctaattactccttttgtagttttaggcaagtctcaaagctttccagatctcattgtatatataatggagacagagttcatgccttatatatgtatataaagtgagaacaaaatgaaatactcattataaagtgcttagcatttttttctggcatctagtatgtgtttaataaatattagctccagttgtcattcttatcattattgttattatgtgatgatgatgtgggttgccttgcaggcagacttatgatgtggtattatcattggcatcagaatatgctggctacagattcacccttgagtttgactacctatgtgtctttgagcagagtcttcactgttctgaagtgatttactttacatgaccaagatggataagtaggccacttatcatcatctcctaagattccttctaaaaacaaatcttttgaacaaggttgggcatttccagaattttggttcttttagaatgtctcattaagctttcagaggcattactcattaggtttcagatataacatgtttttggagaaataacacaatatgatgtggcacattgcattttctggcgtatgagccaaatttggactagttgcacaatctcaagatgcatgtaagactcggaacttgtgttctgatgaagcaggaaaaatggacagatgttgagctaatgtccaggaaatgacaaaagttatgtttgaagaaaatagcttcagacaggggaatgctcacggttaatgggaatccaatgtaatggatgttgtacaggagggagatgtggagtggtggtggtgcacagtgtgctgtggatgcgcagaagtgagttcttcatcctttctggggtgttggaaggtgagtttggcagagccataaaaagatgaatcagagtcaccaagtggagcagatgagaaaggatagcccaggcaaagggaagagaattgcagctacctggaagaattggcatatgtttggggaatggtgagatgcaactagtttggtgtatctggggaaaattgtgtcagaatagactggagaaattgactggagtcagattgcaggaagggatggaaaactactctcagttgagtcccctcatgtgcttctctactcccaccccatcactctctctacataactgaagtggtcagtaatgaatgccaagtatgtgctatgcatcatacaaagtggtttacatatttaatctcttaatcttcacaaaaatggaaaaatttgtgtcttaactagaagcaaatttggctgacagtaatattgtcatttccttgctttcaaataacgaggcataaacaagatataaatttgtttttctcttatgtacaactctggcattcagggttatcctgagggctctggtccaggagagtttttcaggtacataggtgcttctgttttgttgctcttctatcttaattccccaggccatgtcatagcccaaatttggcttctctggttctagatatcttgtttgtattcttgtcagcagcagggaggaagagaagagagtcatgggagcatactaggtgtgttctaagaaagctttctggaagcttcctcacagtgtttttgctagcatcttgtccagaagttagtcaaattgctgcaactagttgcagaagatactagaacatgtaatatttattatgggtagccatgtgctcagctagtaatgggagttctttcactgtggaaaaggggtgaaagaatagttgtatctactaaaggtggatttttatccaattttccagataaagaaattgaggattagagaagcaggataacttgtccttggtggcacagttgatgaatgcctaagatttccactgatgccagttctagtggttctaaccacaggacttgctcttcaacactactcatatgttctagtttggggttcctcccaaaagcagaaccaaagacaagtacctgggtgagaatatttgtaatggaatcataggattaccaacaattctggttttctgacagctgaaggtggtcctgggatgcaggactttcagttttaaaactgaaatgttctggaaaactgtcctgaggatgagatgattcagaaacaagggataagcaccaggccaaaaaaaaaaaaaaaaaaaaaagcatcatgaaggtgcattatgaggcaatgggactccatctcattggggcctctgtgaatcatgcaggatgccctttagaattgttctcctgaaatatgggtacctgaagcatgtacccagtagctcgtttcatcatgagttgagggttcatcccagaggctttgactccagaagcacttctgggtttcgtctgcctgcaccatgagccaacttgggatgagtgaagaaagttctggggcaaaacttagaaagacaaattgcagtcctagatgaggggtcttggccttatcaggtgagtgggaatggtctaccatagggagaactccaattacaggtgagttgagggaataaagtgagtatcagagaaatctgctgcatcttatttaagaactttaaaagctcagatattattttcacagggtagtgatttttaaaccatgcttctttaattctctgaaggttccaagagttttttctggaccaaactttcattctctctctctctctctctctctctctctctctctctctctctctctctctctctgtgtgtgtgtgtgtgtgtgtgtgtgtgtatgtttatattgcaggagtgctcattgttttgactctttaacttaagccagagtggttctaattttatcttttacatcttatcacttgaataaaagtttccacagtttaaaaagtttgtaaagcactggattgagtaataggcagttattgcggcacttatgcaggggaataaattatcaagtaatgcttgaaacatcccattctggctacagcctggggaatgtgtaggaagatcatgcctgcaggcaaagaaaacagcttgaagctgcaatcactcagtcaatgaaggacattggaaaagccagggagagaatggagaacaaagtactaacagcaagacttactctccagcataactcatacatcttagtttgggttgcctccccaagcagagcccaagacaagaacttgggtgagaatatttggaagggaattatagagtaaccaactattcctgcttgctcacaactgaaggaagaatctatatgttagagttcctggactagacaagaaattggatttggatggtagagactgaggaggctcagtctgctgcagagttttgatttgtctagcttaggatcaaaatggtgctatttgttgaaaaattgatacacagtggaagaagctgatttggggagataatgattcatctgtctaatgagtaaatggccggcaactgaggtccttctttctataatatgtggaagcttttatttggggaggattgtgataatttagagaagaccccctggctcctacctcctcttgagaaccctccaagagagaattatccagccagagtgtttgtttttctcagggcgcaggtagaaagaaatcaattcttccttctccgaataaacagatcaaggtatgctgttggtgatgcctgagactcttacctttccattccttaaagaatcactgaacattgaattcattaatggcactttggatataatgtcacatgatgtgaaattggttgtcattaattcatttatacacgggacattcacaaagtaacttggttgacaaaactccctgaaaaagattgacaacttaagaatgatgtggtttcagccttgacgagctctttgtggatttctactcatttggccatttaagactcttcattgtccttcactcatggcaacacactgataaaattagtgaaaaaaataaaacagtaacaacaaacaccaaaaaacctcatcttactaaaatagaataacatccacaatctttaaagcttacttgaaaactatcacacatgaaaggaagaaagaatggatttctcaaaatctgaaccttaggcaggtgtatatggtgaccattttggcttcttaagatataatatgagacataaatgacctgcaatgatgacgggctgctttagaaataccccttcattccttttgctttttttttttttttgagaaagggtctcgctctgtcacccagactggagtgcagtggcacaatcatggctcactgcaggttcaggtgatcctcccacctcagcctcccaagtaactgaaactacgagtgcacgccaacacacccagttaattttttttgtattttttgtagagatggggtttcaccatgttgctcaggctgttgcttaatcctttaaagccatcagctgccccaggattcatccttattctctttttaaataaatgggtattttgggtggaaatttcaagaaatacggaagtatatgaaagcacttttaaattatgtgtgtgttaaaaaaagaatactacatatgaatattataaggatgatgtattataactcgtatcaactgcatacactagcaagtcctgccaaccaagcaactttggagtacaaattgtcttttccttgattagacttaggtctcctggatcttagctgcagggctgctgttcacaaacagagtgctgaaactctcaggttgtttagcacccagctgagggggtagagattttcatacatgagttattctaagatcccccaattgaaaagaatctccctcttaaataccaacataaatagggcaagatgtcatacaagttatatgaaaatgaacgtgatgcaagatatggtccttctccatccctgcaggattcccactttaccccaactgtgccagaatccatggctcagtcttccatccaatgaagcatgctgtatccagactgaggattactgaatgcttattggccctaaaagtactttattcaagtgagatattttgttacaattttatatataaaatgaataggagcagttctgctgaaatgggcatgaggaccctaggacccgtctttcttaggttattcctcaccatgtttggaggcttccagggatctacagaatataacttgcaaatacgtgatgtagataattccagcttttgagtgcctatgggaaagttgactgagttaatcctctgggatttgaatcctggctcaaattttcatgctttttatgtttttggaagacattatttaatttctctatgcctcaaccttctaaacttttaaggaaataacatcttgttcacaaccaaatagagtttctttgaggattacatgatgtaagacatgtaaaagaacttagaattataactgttacagattaagcaccccataaatattacacagtattgttttattaataaggctctaagttaaataattataacttagtttgagaagtcagtccatgtcagtgagcctatgttctcattttttttctggaataaaagtaataaataacaacaaaaacaaaaagaataacatcatcagtaacaaccaccatgaaactcaccaataatcactgctttctagtaattatctactctgtttagccactgttttataatttttctggacctcacagtagccctacagggtaaatgcctcttagacccattttacagatgagaaaatcaagattcataaaaggtaagccacttccccatagtcagacaggtaatccatggcagagccaaagatggttccaaggatgaaggcttcagatcccgatgtctacatacatgaatgatactcaaaagtaagagccaccttttttactgatgctctgtaaactcttttttcggcgaagtatccgtcacatcaatcatttatcgtttctttgtgttacaaatgatctaattatgctcatttagttatttaaaaatgtaaaataaattattgttgagtgtagtcaccctactgtgctatcatatgctagatcttactcactctatctatctaactatatttttgtacccatgaatcatccccactgcctcccaacccaactacctttcctagactctggtaaccagtggtctactctcttatctccataagtacaattgttttaatttttagctcccacaaataagcgagaacatgcagcttatctttctgtccctggtttatttcacttaacacaaagacctacagttccattcatgttgttgcaaagacagaatgtcattcttttttatggcttaagaatattactccactgtgtaaatgtaccctattgtttttatccgttcatctgctgatggacacataggttgtttccaaatagtagctattatgtataatgctgtaataaacatgtgagtgcagataactccttgatacactgattttctttcttttgggtgtatacccagcagtgggattgctaaatcatatggtagttttaactttagtttcctgaggaattttcaaactgttctctatagtggttgtactattttacattcccaccaagaatgtataagggtttctttttccctacatcctcaccagcatttaatattttctgtctttggataaaagcctttttaactgggtgagatgacacctcattgtagttttgatttgcatttctctgttgattaatgatgctgaacctcttttcatacacctgtttgccatttgtatgtcttcttttgagaaacgtctattcagaccttctgcccatttttaatgggcttattagtttttttcctattgagttgtttggggtctttatatattctggttattaattgctggtcagttggatagttgcaaatattttcttccattctatgggttgtctcttcactttgttgattgttttctttcctgtggaggttttttaatttgatgtgatcacatttgtccacttttgctttcgttgtctgtgcttgtagagtattacccaagaaatcttagtttcagatatttggtgcttacatacaaaaatgctactgatttttttacattgattttgtatcctgcaaccttactaaattttatcagttctaatagtttttcagtgaagtctttaggtcttttcaaatacaaggcaatatcatttgcaaccagagattaatttgacttcttccttttcaatttggttgttctttatttcttttgtcagattgctctagctaggacttccagtactatgtcaaataacagtgacaaaaataggcatccttgttatcttccagatctcagaggaaaggctttcagtcttttcccatttagtatgaaactagctgtgggtctgtaatatatggtttttattgtgctgaggtatgttccttctatacccagttttttgaaggtttttattatgaaggaatgttgaattttatcaaattcaaatgccttttcagcagcaatgtaaatgatcgtattttttcttgttaccccttattctgttgatatgatgtaccacattaattgatttgtgtatgttgaaccactcttgcatccttgggatgaatcccacttggtcatgataaatgatattttttaacatgttgttgaatttggttggctagtattttgttaaggatttttgcatcagtgttcaccagggatactggactgtagatttctttttttcatgtgtgtttggttttgatatcagagtaatattggctttgtagagttagtctggaaatatcccctcctctctatttttcagaatagtttgagtaggattggtattggttcttctttaaatctttgatgaaattcagcagtgaagcaattgggtcccaggcttttctttgctgggagaattttcattacagcttcaatctcattacttgttattggtttgttcatcttttgaatttcttcatggttcaatcttggtagcttgtatatgtctaagaatgtatcaatttttttctaggtttttgaatgtcttggcatatagttgctcattgtagcctctaatgatcttttgaatttctgtggtattggttgtaatgtctcctttttcatctctaattttatttatttgggtcttctttctctttttttttttgttagtctgacttaagatttgtcaattttatcttttcaaaaaaacctttttattttattgatcttttgtattgctctcttcatttcaattttatttatttgtgctctgatctttattattaatttttttctactaattgtgggattggtttgctcttacttttatactacttaaagatgcatctgccaaaaggggtggctcatgtctgtaatcccaacacctggggaggctgaggagggcagatcacaaggtcaggagatccagaccatcctggccaatatggtgaaacactctttctactgaaaatacaaaaattagctgggcgtgatgccacacgcctgtagtcccagctactcaggaggctgaggcaggagaatcacttgaacctgggaggcggaggttgcagtgagctgagatcatgccactgcactacagcctggtgacatagcgagactccatctcaaaaaaaaaaaaaatgcataattagtttgttcattgaaagtttttctgcctttttttttttttttttctgaggtggagtctcgtgctctcacccaggctggagtgcagtggtgcgatcttggctcactgcactgcaacctctgcctccgggttcaagtgattcctctgcctcagcctcccaagtagctgggactacaggcatgcaccaccatgcccggctaatttttatatttttagtacagatgcagtttcaccatgttggtcaggattgtctcgaactcctgacctcgtgatctgcctgcctcggcctcccaaagtgctgagattacaggcatgacccatggtgcctggcctatatttttgatgtagacaattatactataaacttttctctgagtattgctttgactgtactccataggttttggtatgttgtatttccgttatcatttgtttaaaaaatattttcaatttcttttctaatttcttcattcacccaccggtcattctggagcatattttttaatttccatgtgtttctataatttacaaattttctcttgttattcatttctaattttattccattatggtcagagaagatacttgatataatttctttttttaaattttttaaggcttgttttgtggcctgatgtatggcctactgttgagaataatccatgtgctgagaagaagaatgtgtattctgcagccattagaagaaatgttccgtaaatatgttttaggtctatttttggtctatagtgcagactaagtctaattttttttttttttttggggggggtggatggagtctcgctctgtcacccagggtggagtgcagtggtgcgatctcggctcactgcaagctccgcctcccaggttcacgccattctcctgcctcagcctcccgagtatctgggactacaggcgcctgccaccacgcccagctaattttttgtatttttaggagagacagggtttcaccacgttagccaggatggtctcgatctcctgaccttgtgatcggcccgcctcagcctccaaagtgctgggattataggcctgagccaccacacccgtccaagtctaatgtttttattgattttctgtctggctaatttgtccaatgctgaaactggggtgttgcagtctgcaattcttatggttctgggatctatctctctctttagctctaataacatttgttttataaatcaggatgctccagtgttgggtgcatatatgtttacaattgtcatatcctcttgcttaatcgacccctttatcattatataatgaccttctttttcccttttttatagttgttgtcctgaaatttattttgccttatgtaagtatagctactcctacactttttttggcttctgtttgcatggaatatcttttactattttttaatttttattctatttatgtatgtataggtaaagtgtgttttttgtaggcaatagatcagtaggccttttttttttaatccattcgccttctctttttcttttgattggagagtttagtgcatttacattcaatgttattattgataagtaaggacttaattctgccattttatcatttgttttctggttgttttgttgtcttatcatccttcttttcttcctccctgtcttttagtgaaggtgattttctctgatggtatgttttaatttcttcctttttattttttgtggatctgttgtatttttttatttgaaattaccataaggctagcaaataatatcttaaaacccattattttaaactgatgacaacttaatattgattgaataaacaaactaacaagcaaagagacaattaataaaaacgctacactttaactttgtccccccacttttgaactttttgctgtttctttttgtgccttactgtattgtctatgtcttgaaatgttgttttagttattaattttgatcaattcatctgttagtgtttctacacaagatatgagtagtttacacaacacaattacagtgttacacattttgtgtttttctgtgtatctattattaccagcaagtactgtaccttcagatgattttttgctgttcattaatagctttttctaggccaggcatggtggctcacacctgtaatcccagcactttgggaaattgaggcaggcggatcacgaggtcaggagttcaagatcagcctggccaacatggtgaaagcccatctctactaaaaatacaaaaattagctgggcatggtggcatgttcctgtaatcccagctactcgggaggctgaggcaggagaattgcttgaactgggacccaggaggctgaggttgcagtgagctgagatcacactactgcacaccagcctgggctacagagcaagactctgtctcaaagaaaaaaaaaaaaaggaagctttttcttttcgcctggagaattccctttagtatttcttgtaggtcaggtctggtgttgataaaatccctcagcttttgtttgtctcagaaagcctttatttttccttcatgtttgaagctattttcactggatgatattctggaatacaagtgtggtgctttttttccccacctttagcacttcaaatatgtcatgccactctctcctggcctataagatttccactgaaaaatctgctgccagatatattgcagtttcattgtatgttatttgtttcttttctcttgctgcttatagaatcttttctttatctttgatctttgggagtgtgattattaaatgtcttgaggtagtcttatttgggttaaatatgcttggtgttctatagccctcttgtatttgaatattgatattgttctctaggtctgggaagctttctgttattactcctttgaataaactttctacccctatctctctctctgtactgcctcgttaaggccaataactcttagatttgtcctttcaaggttattttctaaatattgtaggcatgcttcattcttttttattcttgtttcttttgtcttctctgactttatattttcaagtagcctgtcattaagctcacagattctctcttctgcttgatccattctgctgtaaaagactctgatgcattctctaatatgtgaatttcattttccaactgcagaatttctgtttgattcttttcagttatttcaatctctttgctaaatttgcctgatagtattctgaatactttttctgtattatcttgaatttcattgagtttcctcaacgaactattttgaattctctgtctgaaaggttaattatctctatctcttcatgattggtccctggtgttgtatttaatttgtttggtgaggtcatgtttttctggatagtcttcatgcttgtgggtattagtaggtgtctgagcattaaagagttaggtatttatcgtagtctttacagtctaggtttgcttgtacttgttctctctgggaaggttttccaggtattctaagggatttgggtattgtaatctaagcttttggtcactgcagctatgtctgtgttaggggggcaccccaagcccagtaactctgtggctcttacaaacttatagagataccgccttggtggtcttggtaaaggtccagaggaattccctggattaccaggtggaaactcttgttctcttcttgtactttctctcaaacaaatggagtctgtgtctctgtgctgggctgtgtgaagctgggggaagggggatacaagtgcccctgtggccaccaccactggaactgtcctggatcagacccgaagccagcagagcactgtgtctcaaccatggcctatggtaaacactttctggctactgtgtgtattagctcaaggccctagggctctaccatcagcctgtgacaaagccagccaggctgtgtccttcctttcagagcagcaagtttcccccacctctaggctggttcacagatgccatctgggagccacgacctacagtcagaagcattaggaatctacctggtattctattgtggtagagttggcacccagcccacaagacaaagtctttcccactcttccctccccgccacgacctacagtcagaagcattaggaatctacctggtactctattgtggtagagttggcacccagcccacaagacaaagtctttcccactcttccctcccctttctacaagcagaggagttgctcccagtggcaaccgccatcccaggcccgtggcaagtactgcctggccactgctgatgttcactcaagttccaggggctcttcagccagcttgtggtgaatgctggcatgcatgggactctgccttcagggaagtgggctgtcctctgacccagagcacatccagaaaggccatccacgagccaagtcctggaatcaggaaccccaagagccattttagtgctctacccctccgtggccaatttggtaccaaagtgtgggactaagttatcttttttttttttttttttttttcctaaagcagaaggaggctttccttgtagtcaccacagctaggaaatacgctgggtcacacctgaagccagcacatctctgagtcttacttgaggcccacagtgagtactgtctggctactgcagctgattattcagggtccaagagctctttagtaagcaggtgataaattttgctaggactgagtttttcccttcaagcagtgggtgcctttctggcccagggtgtgtctaaaaatttctaggagctatggcctggaatggggacctcaggactctgcctggtgctgtatcaaactgtggctgaactggtatccaagttccaagacaaagtcctttttactcatccctctcttctcctcaagtggaaggcaggggcttcccccagagctgtgagctgagttgcctggggttaggagaggactggagcaagccctcccttggctgccccagctagtgtctcactaggttgcatcccacccactgaccaaaaccacgggctccaagccaagaacagcaccaggacttgcccaggaattttagttgttgtggcttagactgcctttcaagcttatttaggaccccatacccctttagctcatgatagaaaggcttgctggaactcaggttctgatttctggagcgcttgattcctttctcactaggcctggtctaaatgctccctctgtgggtgctggtgctggctgagttctgcctggtattgctttctgctgtgacagggcaacaatgggttccagtgcaaagtcccacaatcactgcactctccctttcctaagcacataggttccctttccatgccacatggccgctgccagggtatgggtgaggggtggtgacagcaattcaagactgtctttcctaccctcttcagtgcctctttcagtgatatcaagttaaaaccaggtactgtgatcgctcaactgatttttgttcttatgaaagtgttttttgtgtgtgcagagttgtttagtttggtgttcctatggggaagatgattggtggagcttctatttggccattttgctctgccttctccctataaactcatacatgggaatggcagtagttatgtactcaagagctcaaggtccttccttttcactgataaaacgaagtaagctcgtggttgtgatatgtgaaattctaaatcaaggcagtactccttcactttctccatcctgcgtacaccttggcttctaattagcctagcagatctagagctccctttactcagaccctgaaagtgaaacagtgtaatgtgaactttggtgttagactggggttcaaataatgccttggccatgtcctaactgtgatattttcaagttttttcttttctttctttcttttttttttttttttttttgagacagggtctcactctgtggcccaggctggagtagagtggcatgatctcagctcactgccacctctgcatcctgggcttgggtgatccttccacctcagcctccagagtagctaggactacaggcgcacaccaccacacccagctaatttttctatttttagagaaagagtttctgcatgttgcctgggctggtctcaaactcgtgaactcaagggatctgctcgtcttggcctcccaaagtgctgagattacaggcattatccaccatgcccaacctttgcaagtttttcctattttctgatcttattatttttttcctttataaaggtagtgacatctacccacagggtggctatgaggttaaataagagagaaagcttttagcccagtgcctggagttctcaagatataggagctattactataattattaagttcattatccccatcagtcccaggaatctatttccagccacatttcacccaaatgtgagatcctttcccaggagtctgtgtgttctgcatggctgagaaggcaccaggctattctctgctcccttagaaaaggcattttcaccatcaaatggctctactgaatcaacctaacattttcccctcccctgccccctccgtgctaactacattttggcacttcttcaaggggctttctgtaatgagcaggttcccagagaaagctgtttcctgaaaggcttatagcatttaaaagaaaacaagtttagggtctcagcattcttgcttttgaagaaagaaagaaagaagcttaatctgtaggcctggcagctgtagcaggagcctcaggctttcctgatcacaaacctaaagaaccaccatctcatcatgcatgctatttctcagctcctttgcaacttcattctggcttgccgatttgcctggggagggtttggtgggaaacccaacctctcccctaattctttgttcttcaaattagagctgggtactgttgccatcccaatcaacacaaataaacccttttcttacagtagcatgaaatatagtggcatgagtgtgggcgttgtttctctgacaggtttagagacttgtggtgtagtgaggggatgtacatatatgggggctaaacagacttgggtgctggtctcccacaccacaacacagctgcggcactttgaacaaattatttattctctcttagctccattgtctttcttagttcaactgaaatcactgtgtctactctgattgtgctatgaatactacatatggcaatgaacattaagtgcctagcatagtgccttgaatagtctatgtacttaattaattttaatccatttatgagctatatattcattcatttgatgaaatgtctcctgagctctttgaatgtcacacagtgttaggcattgaaaataaagaaagtaagcaagttggacatggtgtcactgctttcatggtgggtacagtcagtgaatctatgttttatacattgggtaaggagagttgaagataaatgaccagaatgacatagttagtcataaaactgttaaagttgtatgggacctcggggactaaataatctctgtgcaaattagaatacattgtatagcaaaggggaatagtgatatatttaaaatcacatggaaagccaccgagaaaactggagcttaactcataattaagtacttttctgcattctctgctctcaggaaggttatagtttcactgacagatgaaataatttgtgaagagaatgcatcagtatgtattattttgcaaaacaaaacaaaaaaaccccaaaaccaaaaacaaaataacctagaaggatctctacttttagggagttattgaagggcaatttgtataaaaagggagacctagatctaggccttgatggatgatgagttgggattgaacattctgggcagagagaaatgcatgaaaaacactgccatttggggaattcttcctaagatgctagaatttttttaaaatacagttttagtgccacaggtattttctcttagaagaagctctgcttaacatagatatttgtctcaatgggtaataaattacaaagaaatggcactacatgcatagatctgtctttccatggctttctggattatgaaaacattaccccacaggaagattatattacatctctgatctttttctgaggggtattgtagattgagtttgctccagccccaacatgaatatctcatttaagagccattaaaattgttttctatctctaaaatctgtaaatttcaagtcagtcacacctttttttccaatgggacctcacacagacttttcacgagaagccttttcatgctttcagaaatcatcatttgccagaaagaatattagctactcagcctaaatctacaaagggaggcaaaagtcaatattcagtatgattcataggtatcagcctcataagaaaaattcataaatattaggaaggttaacttagatatgacacatgttgattcttattaagtttcccactgaccctaggactttcttggggcaaggaattctgtcaagtgtaatgatatccaaatagatttgtaggatggctttttccttacaaactggagtccaaattattttgaatatagtaaaagcaactgtaattttttccctgcttgccaaatggggaccattgcctctcttttggaaagctctgtgtccaggtggactgagccaagatgttttgggcatctgtaatgttttgcagggttggtttgtaagagcaactcaacagcctcagttgattctaccaactgctcgccaccaaatggtgaaagtggtgtgttggaactgacctaggttggagccctcacagctttctattcagatggaaaaataacttttgacaggttgttgagctgggtgagactggctgggaggccacttcttatgattgggtgggtatagattttctatagcccagagttaagaaaacagtttgcatagcttacaaaatttcttctcccttcctgccaaagaaacaatccagggaagtaattcatctaggtacagcggacgtgagattgtgtgttggctttgtctttttatcagcttagctcttagaaaacttacttgatctgttggctgcctcacctataaacagaggcactgatatctaatttgtaggtttgttgtaatgctcaaatgagaggtaacacataaaacacttggcaaacaaaaaaaaaatcttaataatagtagtaatttttttaaaaatcaaattttaaaagaatttcaggggaatttaatggaagaggttcctaaggagtgaacacactgaaattcagaaagaagcccattagaatgaaacaacagatttctggatcttatcccagcttttctatgcctgtttcattttgtcagggaacctggaagtgaccaacagaaagcactcacacttaaacaagtctgcatgtgacgaaagtctaaagcagaacagcacttgatgcatttatacctagagagaaccatgattaccccatgggcttcagtatgcctgattatctaattctttgctctctacaaagaaatgtcaacaaggagagttaaatctctactagggagagagttattagaaaatatagagtgaaaaatgagtcaactaaggactttattggctagtgtgaaaaaccatgaattcctggttggccttttccatggtaggaataaaattctaaaaaatccccaaaaccccaaacaaacaaacaaacaaacaaaaacatggtatgttcatgccaatgagacaatgtctatcctgaaacactttctctccctcccttcctttctccccgtttaagtatactgaatgagcagaataggtgggggtggggggatcagaaaaaggctatttttcattaaagctgctcctatggaccccatgtcaaatcctccattcctgccccctcagatgaaaatctttggcagcccaacagcagatctgctcactcttagagaaaatctgtcttccatccatttcaaaccgcaatgcaatttcatttcaataatcaaaatatccagtcccctttattaagtcaaaatgttaaacttcattacaatttaagtttccctccttcttagctcagaaagcctattgttggtaaggggtgtgggtgtaggtgtcctttgatcagttgcttttatcctttttctgcaatttatacttttaattcttcctctcagttgtagaaaattatgttcaagtcaagggtggggaggtgagctgggcagagaaaggtttagagactagcgttatcgcgagcaggcatcagtgctgtctggcctgggcagttttttaaggtggattctcttttggagttctctgtgcataggtggagactccgctttgcctttgtcttatttctgggggttttctgtattagtttgttctcacactgctaaaaagaactacttgagatggggttatgtataaagtagagaggtttaattgactcacagttcttcatgactggggaggctcaggaaacttacaatcatggcagaaggtgaaagggaaaaaaagacacatcttacatggtggcaggagagagatagagaggcggtggggggaaccaccacttttaaactatcagatctcgtgagaacccactcgctgtcatgagaacaacatgggggaaaccacctccatgacccaatcacctcctaccaggtccctccctcatcacatggggattacaattcaagataagatttggatggggacacagagcccaactatatcagctctcctgtatcatgtcagtgaatacatctcctatggctggttgcttaagaggctgcacaacctctgctgagttttcatcagccctcctggttcctctcttaaataaagcctgttcagacggctcctgcatggctagcttgctctgtcacttggatccattatcagtgacatgcagtgacttcccaatctgttctactcagctgctacaggctgcttcagtctaccatctcctctttaggttttataggcatgtcagtctggtcggtcatgagtctcctgagcatcctccaaactctaggaaatacatgtagcctcttttattcatctctttgaaactcatttagatcaaaatgaggggaaaataagtctgtcatgggatggaagtggaggtaggacttaaagcatgcttcagtgacaatccatctctaatgtccagcttaaattatgtattcctttaatgtattaggctaacacttgcaaaatcagttgtaagccatctcctttgtcatttctgcatagatggacaagcagcttactttgatatgttaattattgtttggggcatgtagctgaaaatgaggctgcatgccatcaaaacctcctgttactctttatttctttctaccttcctatgtttatcatttcaccagaaaatgttgcatgctctttagttatatactaggcactctgttagatgctggggatataaaagaaagtaacaatggatatgacaaacaaataaatgtactattataatacaaggtaataaatgccattatggaagaaagagaagagttctatacctaggaaggtagagaggatagatctaactctaatctgtaggattggataagctttctattctagtgggaggcattgtctaagctgaaacttgaaaaactaatagaagtgttaagaccaataatttggtttgaggggaagtatcaagtagaatggagaatatgtgtgcataagctagaagaaagtaagaatctggtacattccagacaataaaatccaatttgcatgaaatatttacagagagtgtgggtgctggagtatggcatgagattagaaaggaaattgcagtaaaataataaaagtttaagacttttatgatgagtacaaatgaaaacgcctatacttttgaggaagtgaatctgtttataaattgtgttcttttaggtatatttggttactttccatttcagaggatctatcctgtttgtagtgattagaattggaagctgtttaagtctccttaaccatatttgtcacataccatctcattcttccattaatttggcaagcatatacagagtcccactctagccaagtcctctataagaccctttgaactggtggctcaagcctgtaatcctagcactttgggacgccaaggcgggcagatccctgaggtcaggagttcaagaccagcctggccaacatggtggaacccccgtctctactaaagtgcaaaaattagccgagcatgatggcgggtgcctgtaatcccagctactcgggaggctgagacaggagaattgcttgaacccgggagacggtggttgcagtgagccaagattgcttcactgcattccagcctggatggctgagcaagactctgtctcaaaaaataaaataaaataaaataaaataaaaaaatgttctgtccatcaagtcttgcagaggagacagagaaagaaatcaatggtgaaagttttaaattctataatacagggtcagctagtctaaattttgtaatagatgttttccatgggatgatagaggaagaaaatgaaagaacatggaagaatcaagacgaagccaatttggaggtaggtgtgtgtggaataaaaaatacttccaagagtagatgatacacctgagccaagggctgaaaaggtacagatgttagccaagtgagtgatgggcagggagacccactctaggcagaggaacatctgtgaagagacaggaagcacgtgaaggcataacatattcaggaaaatatcagttgcccagattggctggaagacagaatgggtatatgtgggaattacaagagatgtatttggaaagataagtgtaggtatgtgagggagcagatcaggaaagccttgtgtgccttattaaaaagtgtaggttttcttactttaattttgggaaggtaatggagtctctgagtcataaaggcctctttctgtatcttttctatactgacaaagcttgttattactcttaatacttatatgaagtgtctagcttatggaaggtgggcagtgactctgggattcacaagagaactctaaacttaaaaccctttagcaatagcttgctggggttgttatgtagaggaatgcagcaggaaaacacagcttgtcaccaacaggagaagttcatagaacttgcagttaagtgccctgggaaggtgtggagctcataaaaacaggccaaaaccagtctgtctaaaatgatgctgagtggccaatgttcttctctatgtaagaatttggaagcccaggttaccttacaagaggctgatattctgagatgcaaacacgatgggtttattgtctttttgttttgttttgagacaggatctcgctctatcaccaaggctggatacaatggcgcaatctcagctcactgcaacctccatccactgggttcaagtgatcctcccacctcagtctctcaactagctgggaccacatgcatgcaccaaccaccaggcctggcaattttttgtattttcagttgagacggggtctcaccatgttgcctaggatggtctcaaactcctgtgctcaagcaatctgcctgcctcagcctcccaaagtgctaggattataggtgtgagccaccatgcccagacagccttattttctaaatctcagcgttctccaaacattctaatatggcttattgttgctgcggtggaagttttgtcactgggttttttcccccactctttttcttcccctctgccccaaaactctttggataccagagcattgcctgctgcccttaaagggaggaacctagctgatctgactctgatccttttagcagtatgtactttagcatatatatatgtgtgtgtgtgtgtgtgtgtgtgtgtgtgtatgaatacatgcatataaatatatgtgtatattttttcatatgcatttatatagatacatagcagggaggtagatggatggatggatggatagatagatacatacatacatacatatatttgcatgatacctaaaagagggaaaataattacatttgtctcttttcaaatatgtacaggaagtgtagcccagtaaaggaatcacttgagtgtcatttttgtttgttaaatttaaattttattattccatcttttcaactatgattcataggttactaaaaatatctaaagtgaattaaattttggacattaggatctaaaattttcacaataccagatttatcctggaatgaaattaaatacagctgttattttagtggagggatgacagagttcttgtaatcttcctattcttatttcaattttctaatttagtgtagatcttcttatatttctttctttgtgtcttttctctcaagaggcttacagtaagcctccatattaggaggcaagaaaatgaaattgggtggatggttcattgtcacctctggtaatgatgacaagactgtccatgacaaccatccctgaaagtattctcctcttccatggagttggccaaacttacctgaccagtatgtgaaaaatttggttgaaaagtttggtcaattttggaggctcagttctgtccttaaaaacgtgtcaggactactaagatccatgttgccagaatctgacaagaacctcttttccaacctgatcacctctttttacctctatccaccttacacttagcttcccaacctgtgtctgaattccctggattcttctcttttgtacaagaagcctatgccccagagagcttatctatgcttttctctgattttcttctttagtgaaactccacactgttccaaggaataaatgagataatgcatgtaaatgtcttagcacaggccaagtgctcagtacccagaagaataaaagtattaataactgctgcaagccctatgatggattttaggaaaatatgagtctaccttaaaccatttatcactccacctaagaacatgtattactgtaaatctctattaactgggtttctaattggcaatctattttcttaacgcctccactcctggctcctccattctcagtgggtcactgtgttgcagaagacagttcgtcttttcccagcaagaaggtccatcacgatgtctgagttcgaatccaggttttgctacttaccagctgtgtgaccttggacaatttacctccatgggtcttagtttacacctctgtagagtggggataataatagtgcttgcctcataaggtaggggaaggattaatcgggttaaaatgtgcaaagtatttgcaaactatctggcccaagcgatgatcatatgaagatatatcactactatcatgaatctccctgcatttagtccatgactaacatgaagctccccaagaaaggaaaaacacacacatataaatggctttcttagaaaggaaactaatctacagagctgcacatctacccacaaggaggaccaatcgtatgctattatgcagagaatagtttatcttcacattatcttgaaataaaatataacagaatcttggaattttgtttttctctgagaaacaaagtttcattaaagttttggactttgctcccccacacaaaggcacaacaagccctgaaagatccatttgagtacccactcctacagaagctagaaaagtaatttgtttatcattaaaattaaaaatatcttgccaaaactactggaggacagtttcagctaggttctctgatgacatattaagtgcacgtgagattgtgtaaattttcagtagcaagctctcaaatcatatttgtaatggtaataataacttgcattactgttacataaatgttaaggattagaatatattacttttttttagacagagtctcactctgtcactcaggctgtagtgtagtggcattatcttggctcactgcaacctccaccacctgggttcaaatgactctcatgcctcagcctttcaagcagctgggactacaggtgcgtgccaccatgcttggctaatttttttgaatttttatttttagtagagatgggattttaccatgttggccaggctagtctcaaactcttggcttcaagtgatcctcctgcctcagcctcccaaagtgctggaattacaggcatgagccaccacgcccggcctattactcttatgagttgaatttttgtgttgcctaaaattcatctgcaaaatgctaattccctgtgtaatggtgtttggaggtgaggcctttgggaggcaattaggattagattatgttatgaggacagggccttcctgatggaattaatgccctcctaaaaacagggagtcatgagatccatctctgccttccatgtgaggatacaagaagacagctgtttgcaaactaggaagagatccctcactggacaccagatctgctggcaccttgatgtactttccagcctccaatactgtgagaaataaatgtttgttgtttaagccacccagtctatggtattctgttatatcagctcaaactaagataattacattaagcctaatacaataactatatattttatactaatataactaccttcatcacttttatttgatagtgaaggaaagtcttctatgaaattttcacctggggatctcatttgcacttaaatgattccataattaagttataagagcagccttgccagctttctaaaaatctgcatttaaatttcacaggctgcttttacaacaggatggataatgtactttgctcctgtctcatctcaagtctctctctctcctctctgtccctttctttctgtctaacatccatctgtgctttgaaacctcctgaataggatgtgacagtatctggaaaagtgtgaggtctgtctgcattaagttgttggcacatttcaattttaggaaagtcataaagcccttataaactttcataataaaattatcaaacaaccgccgggcgcggtgggattacgcctgtaatcccagctctttgggaggccgagacaggtggatcatgaggtcaggagatcgagaccatcctggctaacacggtgaaacccgatctctactaaaaatacaaaaaaaaaatagccgggcgtggtggcgggcgcctgtagtcccagctactcaggagactgaggcaggagaatggcgtgaacccaggaggtggagcttgcagtgagccgagatggcgccgctgcactccagcctgggcgacagagcaagactccacatattaaaaaaaaaaaaaaaatcatacaaccaatctctacgtattttaagtcacattatttcaaggaaagaaaaattactttgtgagtatgtacactaaagaatctaattttatttttgtgacaaaattagtgtgagatggttgtgatactctgaggctagcagaaatggagactctctactgtgagaatcacattaagtttgtatttaaagcacaattattaaaccttctgaattatctgcagttaaaattatttacattatacaatgtatatgactatcaaccatatgagaataacatgtggaatctgcatgaatttatataatagaaatgtaatgatttatgatcattttgctccattagaagatataagaagaaaaaaaatcaatagatctcattcattcatcagctcacagtgattaaggatactattgcataacagatcaggtgctaagtgctgggacacaaagataaattagacgtgttcctctacattgtaaaggaccctaaagttcatctaatagtcagtgatggaacagactcagagagtggtctatttgctcaagatcccagaactagttcatagcagaactaggtaaaaattcaagtctcttgactcttaactttagcctgatattgaggccaaatgacagctttaattacgacagagaagtattaagaatgtcattttggaaaattcaaagtccactagaggaaaactcatttcagttagaggctgtttcttgcaatctatttctaattcttggtcttaggcctcccatgtgtactgacagctggtaatatatttgggtctttgaagaaagcaacaggacctgtttctttctacgcactaactgtggctaagcaacaagacctactctctactgggaacagaattggaacccttaacttcctgtcagccacagcccacactggatttccctagaattttctagaagcaaatggctaccacaggaagaaaaccatagaattcagctggaaaccatccaaatttcctcatcctaagcttcatctccagcaagcctcagtcaaggagacccacaccacaaggctatgacataattcttggttgcctgccaaaatagagaaaaaaggatgaaaaggaagagtttttattgcaaaaagacagcttagggaattttttcttaacttagtgagatggaatcctgagacaaagatttgttagagataacttgtgtaggggtattaaactcaacagagataaagggagatgggtgagtaataagaaaaataaattaacccttggtgttttcttcaggcaatgctgaaaacacacacacacacacacacacacacacacacacacacacacacacacaaaaaaaaaaaaaaaaaaaaaaaaaaaaaccttatgcccaccacatcatcatttgtatcttaagtaaatgcttggggaaaggggttgagccaggaaggaagaacaggtgttgtacatcgaaccaagcctaaatatttggtatggaacagttgaagatttaagattgtaactccagaacttctgatcactttttttgtattgttaagggtagcaactgagattagataactcacttgctgaaggaagcacattcttggctctgtgcgacattcactgtgccatgagctgctagtgcttactgatacccatgtgctctttggcatttcccagtctcccttgcacttgagctgaccatgtgactatttctgaccaatggactgagagtagaagtaatgtggtcacttctgagggaggtagttaagtatcaagtgtgactcccctcaactcttcgactccttcctgcacccctgcagctggaagaggaggcttggagatggtagaaacataagatggaaggggtctagatggctggatgactgcttgaggagagttattcaagactgctacttagctgatgtcagactctgagtaagtaagaaacttttgtaagatacataaaagtttaactgtaggaagaaaagtcatttttatccatgaaaataaaagatgcctaagatgtatgttttcaaattatattgggatttatatatttcactttatataaactcaaaatcatcaacatatgcctttgttcacttgcttctctgaacttagaaagtctgtaaataaatgtaatgtcaaaagctgaaaacacccaaagctactgtgatttgtggattgttacaacagttaacgagaaatatacatacactaaatgtgttctcctcattttcttgtgtgtactgctccaatctttttcagatgtaactgcttccccaggttaaggggagagtaactctgctccctgttctgggataaaatcctctttggtctcttggccattccctttgccagtgactggtttaggagtagagatgggactcaatagttacactttctgggggcctctgaaaaagattttcttgttcttacagaaaagtcacagattgaaattgctcatttctgaatagaaatggagatttggagggagaggtaatgcggcaaaaaactctaaagtggttgcttaataaagtgaggtaattttcattgtctagtcaaaatgccaacataccaaatatggttgattggggccctgaaactgaggacgagaagcaaggggaaagagaaggtcccaagaacactgtggtaagcagggattgacagagaaatatctccctaaggagggcaatggcccctgacctattagaataataatacctgccccctaattttaaattgtttcatgtgtcataatgtccttttgttattgcagatccttgtgcatacaactgacttgtgtgggtgaggcttgcagaaaaaatcagctagaacagccttgggggtagtggcaaggtggccagagcaattgactgggagctgggaacaggaatgaagaggaagagctgataagaaacatgcccagagcaggtaagcacctctatccctccaatcttcaaaagcatgccgggcgggcggatcacacattaagttggaatgtaaacagaagtaaaggagtatgaagaacactatagcaaggaggaaaaaaagccacacattttgtgccagacagacttagtttgaaatcctatttatagattttgtttcattaggcaatttatttcattctctgagcttcaggggaatcttagtcattgcagttctattacttaacaaagtctttaacagttttccacttactatgtaacatatatatttataacatcttgtctaggatgcagaagagctgtatcttgtatttcctttgctacattcagatgttctcataggttgcttcatgtgtaaaatgaggacaatgccattgttatactctgaaccaagttattggaggaagcagtgtgacaagcacctcgtaaaccctgttaaatgtgcagataagctattaatagaaattattgcaccaatttgatctgaagactcttccagctttgcatgatagatgcattgtcatgtcttatgttttgtaaacagccacacttcaccactatttagataaaatgtgactaagtcaaccttagtttccagacaaccctggatagtttttactttatcttgtatttggactggcgttgggacctctttagctgagaattcccctcccctctgtgagccattagctgagaagcaccattgtcagaaattctgaggatgacctgtcacccccacagccttgccctttctgacttttcagccacccgcccaccatccccatctggttgaggccttggtcagtgtgggagaacaggaggaatctacttagctgagtcatgacccaggtctagcttatggtataaaaccaattaaagcccctttatctgtggcctgatccatcacatgggggtattgagggaggtgaaattccagcctcatttctcttggcagcttctgtgaaggggtagggttcccggtggtcatggaaaaataaagcacacagaaaagggggctgattgctttcacttcattcctgctgcctcccccagaaatgttctctggccaaaccaaatcccagggctcccagaagacccaatgtacccaaagccaagagcaactcctacctcgctgccgctacttactgtccccaaagggcctatctagaggatctggtcaggaagcttaaaaatagttgagtgtgtggtgacaagccttgtggatttcctttgtaaaaatattccaagcagggaaataaacctttcagcaacttatttttccattgctctgtggagcagctcccactctctgctgctataagtacttcaggtagcttgtgggtggtagtggtggtagggatgccagaggggaagtggaggggagatgtgtcttgctcagagaaccaggtttagggggccagcaactattaggatctagaggcaacataacatttctgcacattctgtatacagaaggaaatgtaattccaagctgctgagtttggcacatgaggcctttccagatctagctgtgtccactgccccagcatcataaagtgtcagtatcagcagttgccccatcacattatgatgcttgattcctatatggcttcccatcctctgttccttccactgggaacctggaccctcaccatcatccccagtcatcatccaacctgccagtcattaaaatccagcccagaagtctgccttctcagtgaagtcttctctggcctaagagttaatcactgttttctgaacaacaattctgtcatcattgcatttatcatatggtggggtgttccctcatggggtttgttttctatgcatcttcatgtttttgcagctgcgtacaggatctggcaatgatcactactgccgaacaggttaatcgagcaatttgaagatggcagtatttctgccaaagaagacaaaaagacagaacgaccagtttacaggcagcttagataaatgcaggtttccatgaggttaaaattttgtggaatgctcatgtccacttcacatttctgtcagtaaattactgtgttagaagttgtcccaaataacactgcgaagaactttgagaacttttgagttaacaaagaaccttatcatctttttcgttttcagcactcccttgagttaagatgttatgaccccatttttacaaatgtgaaaacaatttccacagaggaggtagaagaggagagatagagctgagactcaactctgattgcctgtatccagttttttctttccacaaatgaccaaaaagtaccaaaaaacaaagaaactatgagaaaaatgctttctaatagttgtttactattatgattataactactagaaaatataaagcccacataagattttatgtctccaaattcaagaaaatcaccaaagggcaaggcatagagtagcagacaataggctgcatcctcacctggatcccggaagggcttggccatcctcattgatgctatggcagcactgatacctgccaactactctcaagggacaggacagcatggtggttcagagatcaggctctggagccagattgtccaggcttcaatctcagcaccccacctatttctatggggtctggtacatgttaatctctctataccacagtttctccatctttaaactggtggtagtaattagacctgactcacagaattttgtaagttaatagtatgtaaaagattaaatggcccagatacagtggctcatgcctgtaacctcaacactttgggaggctaaggcaggaggactgcttgagtccaggagttcgagacctgcttgggcaacatggcgaaactctgtttctacaaaaaaagaaaaaaaattaaaaattatccaagtgtggtggcatgtgcctgtagttccagctccttgggaggctgaggtaggaggatcactttagcccaggaggttgaggctgcagtgagccatgatggagatattgcattgtagcttgagtgacagagaacctgtctcaaaaaaaaaaaaaaaaaattaaaagatcaatcagtgttatctactatgtgccagttatttaccatgacaccatcagattctttatctttcattctcataagaactaatttaggtattattatctctattttatctatgaaatacctggggctacaaggttagatatttttcccagtgggagttctgggttttggatcacaattattgtgaatttaaaattctatatacgtcatctcttacaataacaaaatactcaattaattttcttttcatggatcctggaaacagccctcctttgggaccttactgaaggcttagatacatggcttagacaatctgtggaggtccaagcggcaagcttgataaactgggatttcctgagctcttgtcagcttctcaagtcagagttaatgctgaaagttctacatggggcatgggtgtagcttagataaatacccagaggcttgggaggtagagtgaaaatattttgagctggcaagtctgttcaattaatatgtacttgggagacattttcaaagctgacagatcttttgtaagtgccaagtgatattaattattagtataaaagcagatcccaccagtggagtcagagacacccaaatttatgtgtgttcgggtgtatcatcgggttgtgaggttgaggatgccaacgcttctagctgtgagggcaaaatttagcaaatgagtgtaccctaggaatgaggcaagaagagtctgaacctcttctttgtgtagtgcagaaatctggtcttgtaggaaagagttgctctcagtcttgccagagtcctgctcagaaggtaaaagtctagtgggctgcccaaagggaaggtgtgcaatatatagccttatagcctgggttgaatcaggcaaaacaagagaaatatggctaatgttttaccagaggataaagcagggccataaatgagagaaaaatgaaccctgagctcagaggtggaaacaatatacaacctgtcaggaagtcaagtccagtgtaggtctggaaagtgcttcagaagggagtaatgaatagtgtgaggtcctggcagctctgagagtgcaggctgcctgccgcttggtggaggatgacctggtctcttacagccttttcagagagtcaggtagttcccctccgtgaacctaacagcttctgtgtcttctccaggtgaatttcactttacatcttcaggcatgtttctgattttttgcgggggacagaggggaggagggaaagaagaatttattcttggaggtagatgatccattcttggatccatactctttgtggtagatgatccattcatgagctctctatgactgtgggtgaggtatttcttttcttttgtaatcagttcctgatccgaaaaattaggaatgggctcagaatgttccctgttttcttccattgccaactttccataatgtacagaactggcaattcctttcttttgctaattctgcaaaacctaagggtctttctgagatgtcccgtgggctagttgagtaaatctgggaatacctagtaactagggctgtgttaaaaaggacatttttggttttatctgttttagggttcattaaagtttaataagctatccttgggggaaaataatgcatacatatacaattatttatatatgtggtttatcccttttgtggaatacggttttgtgtgggcttaattatttaaaagaaatttatggcaggttataaagccaatttttgcaatgtaaacaactcccactcattgttttgaaattattgaattttattaacaataattataccttgtatctatgaagcacattcgattttattaaatctagttgtttgtgtaataacgggttcagaaaacacctgtgaactaggcttttttcttttgaaattgctttattgttttctttcagtcataaaatgaatacataacagcagggtgctatattaaatatttacttattttcttctagtgaagagagagccagacactacactaccatggtcattcttgggagaatgattcacttttgaggcaagaatgtggctctctttcccaaaacggatgtagaggtctatcaccagaggcaattggttctccttgttagggaaataagcttcacaattcttatgcctctgttgtagtgaaccacattctctcaaagagttcagggaagaagagaaaagtattcagggtggaggagaagattcattactggcaggaggtgattgagccactgcctctggcacagcactccttggtgggcttgccttttggctctggatggagctgagcaagctaagcttgtaggtctctggcctgaaaacctaggaacattgcagccacaagcttggcattgagggagtggaagccctatcctctgagaaagcacatggatggcccatgcaaggaacctgaatcagcagtagccaagtgacatttgcataactctttgtcatggataagcaaactttgtggaaagatgcagattaaataaacattttgggctttgtgggccacataatctctattgtaactacacagctttgccactgccatgtacattgagcaacagcatggatgttactatgtttcaaacaaaaactctgtttacaaaaagttagcgggctgcattcagtctgtgggccatggtttgctgacacctggcttgggatattcccagaagtagagttgccatgtcaaagtgtacactcttttctagatttttctagatgttttcaagtcaccctccagaagggtaactgaattgaatccttaccatctgcatgaacgtacttgtttctctctatcatcctcaatactaggtattttcatttttttaaaaaaggcttggccaggaggctcatgcctataattctagcactttgggaggccaaggcaggcaggtcacttgaggtcaggagtttgagaccagcctggccaacatggtgaaaccctgtctctactaaaaatacaaaaattagctggaaattgcttgaacctgggaagtggaggttgcagtgagtggagatcgtgccattgcactccagcctgggcgacagagtgagactccgtctcaaaaaaaaaaaaaaacaaaaaaaaaacaaaaaaaaaaacaggaaagcatctgtactttaattttgcatatggaaaatggaaaacattaaccaaagtgttaattttctttttctcactgaagtccacaaagcaagaaattgacaaatttggggttactacatggaacttgtaaaatcaaatcatattaatatatttggtgtggagagtctctgcaacaggaggatggtgtgtgtgggggagagtacctacagtggagggagaggttggagagtgtgtcacaaggattgtggtggaaaagatcgtttggctgcttcatgattgaatgggcatgcggctgatcaaggtaatcccagcagatgagctgcttgggatccttcattaccaatggcccacctaaggtgaatcttctaggatgttatatgacctatgtaggataacccttgcaagagaaatatgttggcttaaatttatgtgtcccttccctctactgtatatcttcccaataggacccaggcatcagaaaaaagaaaactcattggagattttaggctgaactctttggactcttcaaggatgggagaactgttgactcacttgtcaagattctcttttgttttctgattttttctatgaccagccatacactagccaaagaggtgaactaatagagtacactctttggagacacacatctgatttgaatcctagctcaaccctatagtggctgtgtagactcagacctagtctctctaagcccatttgttttaatgtaaaataggcacaataacgtctccctcttaaggtgtttgtaagaattcaatcatcacatgtctggagagtgtctaggcaaatgggaggtattatgtgtccaactccaggacattgctcataaacctgtgatttagctcatagagcactgggcacctaaggagatcaaaagatctggattgcactgactacatcaggtggccaaggattggttggattagtggggcctctcaaatcacatttcacagggaacaatcctatggagagtgattaggaattaggttcaccaatctattttgagaggatttggtttggtccagccaatattttgaagtactcacaatgccaggttctttgcttcgttcttgaaatatagatatgaaccaggaattaattctggtgccaaggaacttcacactgtagagatggatatgagcaattaccaaaaaatattctaaatattatctgataaagtttttaatggaggaaatcataggatgttaccaaggcaaagaggaaaaaatccctaacttagatcattgggattagggatggtttctcctaggggacaaaagagcttaagtcttcttgatgaaggtgtggtatatatttgaatgtgaaggcattaaattgaatgatgcatataagagaatagaataagtattgtgttgtaggagacataagatgaaacttgggggatagcaagagatgtcagttatgaaaggctgatcaaagtcttcattctttgaaagccattgaaacgttttatacaacagagtgacaagatcagattcatgtttcacaaatatctttttggtttcagggtggaggatgaatagaatggtgaaaccagaggcagagatactagttaggaagctagttcagtaattcacatgagagatggtggtggctgaattagggaagtggcagtgcagaaggggaaagggatctatgcaatcaatattaattggtaaatttggcaagattgggcatgggttgcatatggaaaatgaaagagagtgagaataattcccaagagtctgatttgagcattgggtggttggggcgggaagtgagggtgggggcattccttgatacctgaacaatggagggggtagagatgatgagtttagaaagcagaagagagacttcaaccaggaacttctgggcttggaatcaggttccatggcttctgacaaactgtgctgactatgggcaaatcactctccctctttagctttagtttctcattttatcatgcaagtaaatattagactgaagagagactcccaaacatgtatctgtggtcacacaactgtagactctgatttactaagtctggtgtgcagtccaagaatcagtattttcaaaagtttcccaggtgatgctgttgtccaacaggtttcaagccctttggagcaggagatccttgaggattcttacagctcaagcatctcttaatgcagtttcctcctagctcttgctccttcctgctgactctgcagatatgagctggcatctaatatccagtgtggccttcacagacactaccatgcatgccagtatccacagtgtgtctcactttctctgtccctgcaccccttcctccactcatcacacggattgggcaggcagaaaaagccaagagtattacccttcacataattggcaccaaggcaactccctgccatgtttttccttcccaaagacatatggttgatttcccaccaggatattgtataataaaccacttctgtagctcattgggatggagggttagtgattttgttccaagtgtggtggtaaatgcattttttaaaaggccttccctaaacttaaagttttagtagacagaacacatccaagaattgagcatttatcttccacatgtgccgggaggacatgttacttatcttctctcttggtacttccactgatcccacttcctgctatggatgagctcagcagacatggcatgtagacacatggggaaaagtcatcaacacatctgaaaaattagtaatggcttggccatcaacagagaggcttaggtgttacttcttacaacctacaaacagcattaattacactgaaatctccaggctggaccaagaagaggatccccttacaccacacataagtgcatttgcctggagtgaaacagcacaggtcttcctctcactgcaaggctgtgatcaattcttggctcccaaacccaaaagggatgtggaaatctggtgggaactgtaaaggcctggaatataagacttatgtgcacagatgaaaggcagcaggcttgttcagctgggaggaactgtaggatggcttaattataacctcctggtctatagcgagttcttagatcactgatgaggtaaacccgctgctggatcccaagctgggagctacagcaaggactcaaacctatttatcttttatttttctatggtgtttgggatgcagctctgaataaagtggtggctgaggaaactgattcagcaactgcatttccagatccttttacagcagaaagagcttaactttggggtaattcaaacctgagtttgaattccaattacacaaattacaaactgtaactttggatatttcaactgcgtacattgtaattttcttaactataaaataaggttaaaatattgaccacatagggctattttggggaatgagagagagagagagagtaggagtagtctcttatctagtacagagcctggtaagttctttaagtattttcagagtgaaggattagataaagctatggagaacgtttagacagactatggtagacaagctagtagggtgatttgacgtctcaatttgccttggatggtgctagcttaaaaattcagcaggcatgcaaaagggtctcagattgaagggacaaagtgatttccctgtagcctctgaataacttaagctctgtggtttgcaggaacttagtgatgtggtcatgcatagtgtgcgtgtgtgtgtgtgcgtgcgcatgtgtgcatgtatgtaatatcttatgtctactactctgatgtcttttgagcttcttggaaacttggataatatctaatttatctcttcatttctctttatccctaaatcagcaaatgtgtgaggagaaccaatggtaattatatgccttgtataatatgagaacagatggaaaaataaacaaacaccaaatctcacttcctcctgttgcttaccttttagtggcagtgtcagatttttctcctggactccttctcctaactataatttaaaaaatgtatttcatcatgcaacttatttattttaaaaatctaaagtattacagataacatggaagctcttatccctaatatcattcccccttctctaaaggcaatcaccaatatgaattttattgtgtatcattgcagcccccattttctatgtttattatgagatatatccactaataatacatatggttgctatttcttacctatttacagaactatttcatactacagtttttaacaacttgtttcccctttgttactcaagattgcatttttgatatccattcatgtctttacacatagatctaattaattcattttgatttttgttattgtaaattgcatgaatatattacaatttatttactcattctttctccactgaaggacataaagattgtttccaatttttcttcattgtaaacagacactgctataatgaacattctggtttatgtgcaggcatttctctgaagtagaatgagaagtcattgggcatgcacattttaacaatttcacgatctacagtcaaattgctctccaaagtgattgtactaatttagactcccaccagcagggtaggaaagttcagttttctcatgtctttaccaacagttgctattgacagactctttaatgcttgtcaaactatttggtgtaaaatgcttcactgttgttttaatttgcatttcctttatttctagtgaggataataatctattcatatgttcactggctcttctgaattgcctgttcccatcaattgccaacttctgtgttatattgttggttcgtttaaactgatacataatttctctacctattcaagataatctgtgtttgttttacacgtgtgtttgttttacacgttacagacatattttctaagcctgccatttttttaagtatgtttcatggtgtgcttcgtaatggggaaaatcttaattttgatgcacttggttttatcaatgctttcctataaattgctagtgtttgagagttttctaagaaatttgatttttatctcttagtcaaaaattgttatcctacattctcttctaattaaaaaatcccatttgcagttttatttagttatttttgtctataaagtgagttccgaatgggaaaccaggtcatttactgcacttttttccttcccactgatttataatgccacctctgtcatacaccaggctcatatgtgtttcagcttatttaagggcttcaaattttatttcattaacttgactttttctctgctccaatatcattcttttaattttatgactttaaactgttttcatggataggtagtcaagttctagctcattttttcccctcccctcagaattatctttgctgatctttgttgtttgcatattcaaatggagtttagaataagtgcgtagagttctgagagagaaatcttgttgagattttatctgaaacctcattaattaaatatattgatgatttggatcaagttaatagctttgtgattttaaatatctccactcatggaaatggcacaactctccatatattttgtttcccttatgctgcttatttcataattttgtatacaaatttttgcatatatgtatttttaaatttattcataaacacctttttttgcttttatgcctgtacttatattgcattattactgatatgtatatattcttccacccttgtgagatcttagagtgactttgctagtttagtcagtttttcttagatttattatattgaggaccttatatatgatctctaaatatatactgataagcttaaattcttaagtatcatttatttttcttgccttattacgtaattagggcatccagttgactagtaaaagtaattataaagactctactattttcttttcttgactttaatagaaatgcttttaaagcttcatcattcattattatatctatagtagtttttcgctagatgtttatttttaaagaaagtttcttgttactgatagattgctaagaattttgtcatggattcattttgaattttattccttaattttatgtatctattgataaatctattttttcttttagtttgctcatatattgaattagcctactttgatagattttttttcctagttaaccatacctgcctcttttttgatgaattttaataggccattatatttgtttgttagttttagtgaagggttaggtttattatgcttggattttacttaagatgtttaatgaattttaataggccattatatttgtttgtttgttttagtgaagggttaagtttattatgcttggattttacttaagatgtttaaaattaagatttttttgccatctgtaactttattttattgtacattttttggagtggggatcttatgttaatatctcttctgaccattctattaggttggtgcaaaagtaattgcagtttttaccaatttcaatctaataatctattagtctataataatttcaatctatagtctattagatgactactattatctactagattattccacctactatttttattgtacatgctagagcttaagaaaatttttcatcttagactatgctctaattatatcacctgtgtgcatttttcccattgtaaaacaaattgtttttctttttgatatatattggctggtgccaattgttctctcagagaagtaaatgggatttttaaggaaaaaaatatctaggtttcccacatttaacttactaatcttagcaatggctaatagggaaattcccagatgaatcaaggaaatatctcaccttccacaacaataatttattaattataattaatcagattggtagctaactgtgtgttgggcactgggctaagtactttatttatatacatgatgttatgtatttgcaaaaatcatatggtataagcagtgctagtctcagtttagagataataaaatttggattaatggggtttaagttacttgctcaagtgtgcataggtggtaaagtggtgatttttatccattcctttctgactccaaatcacatacccttgaccactttgctacattgtgtctacaccaatgtttggagaacctaaagccacctgtgttaactccattccagcacttaagggagtttaactcaacaatgtctcctggttagtatatcccttatatctcagttctctctgcttaacatatacagatttcttttcaagaaatgcaaattatatttctcttgttctgtcttatttatgttttattttttcttcttacactgcgtccaagaaacacctcctcatgctttggtgtcttctttcttctttttcctcttgtctgtgtttagtttcctcgttttctagttagtcctataattcttactgatccttctttacttttacattagaaaaaaggagggtttaaaaagcgttttttaaatgaaagaaaataaattgtccttcattggactattgttcctccaagctaggaagttgatgcttgattctctgataccccgggggcctgggtggtgttttaagctgggagaagatgggcactctcctgaactgccttagatgcttccttatcctgggcctctctgacaggcaacatgcctcaactttgtcaacaagttgtggtttgtttcactggccaagcataagacagagcatgaaggccgagctgcgtgcctggtgctgcatgtttcctgtttctgtaagctatttgttgtcaactctcttttttcctttatgatatttaattgaaatcacagcttaatgaggcctgaccagtatttttcctttggtcacagatttgatgctactgccaatgtacctgaataagaagacaactctttctggaaaaagggaaaacttgaagggctattgaaggccgctagaaaggtattgtttacatgatgcattttccccttatcttcaacaggtaaaattgttactaaactgatgtttcctttaacaatgataatttttatttggtagtcttgggatgtccctgggagctcaagttcagacaatgaatctagatttttgccagttgaagttcaggttttgtgacctcacctaaaatttgctcctggggcttggaaagtttaaaattgtgcttttttattttccccttcttttttttagcacagttcagatgccatgtccctaggaatttttccttaattcccaaattgcaataatatatccatcatctgcacatctacattacttgtatttaaactgtttcatggcattaaccatgttttaccctgatgcaatgagatacaatgcagttagatgagagaatatgagtactggagctggacaggaatggatgtgaagcccgtggcagttatttactgggtgatcttaacatctcaatattttcttcttcataaaatgataatattaaaaataatagactgttaatatgacctaccttatcttgttgttgggataatttaaggaaattacacattgtattagtctgttctcatactgctgatgaagacataccaaagactgggtaatttataaaggaaagaggtttaattgactcacagttccacatggctagggaggcctcacaatcacggtggaaggcaaaggagaagcaaggacatttcttacatggtgacaggcaagacagcttgtgcaggggaacaaactctgatttataaaactatcagatcttgtgagacttattcactaccacgagaacagtatgggggaaaccacccccatgattccattatcttcacctggacccacccttgacatgtggggattattgcaattcaaggtgagatttgggtggggacacagccaaaccgtatcacacatgtaataaccttggtgcacaggagaagcaatagatgactatgattttaccatcctttgagttaatacccactatcactggtgcctgtaaagggctgcacttgtagaaagtatgactctgtctttccataacactaaacatgaaacctaagagcttttcatcacggggatttgtctcatcatctggcatgctttctttgacacctagccaacccagtaggctttatctgagttaacctcataaagtatcatattgtttcacacaggggtttattcctgaaagttacttaatggtagtttttaagaaaattaaatcttattttataggcacctgggaaaatcattattaaagtgagtcatatggctaatcgttttgcgtaaaggatccctttggaaagtgaataatctcttgttagttaccatgcgtatgttcagataccagcgcttcttagagaggtgcttaatccatgtatataaagtactctatacaatcttatacttctgctaagaacatttgccatggaatccagggatagatatacacgaatgatgttgtgttactttgtaaaatttgtctctgcatttttaataaattggtacgtaaatggattggtatgtatttggattctctacaacacaaacttctaagatttttagttttaggaatcctccaaaagccaaggaaaaactagaaggaaaatgatatttattgagcatctttttgctaagcattatgtgaatcatcttcactaacatattatagttattcctcatcataatgctatgaaaagtattgcttaccttttattggagagaaaaaaaatgaggctcagataagtaaattacactatgccaggtaattcagctagaaaatagcaaagtacaggatttgaaatcagatcttctggatgccaaatcccttacttattccagtaaagtactctttcttgagaacaatatactgaatttcaacgggaaataaaatttaagatgtgggtggtatttatcttactattcgggtacttaaaaaatatcgtacattatcttcgggccttattttttaacctgcctatggaacgtggctctaaacctttgcactgaggctagcttcagtgaaattttgaaggagttaatgccttcctctttttgatacaagattaaacatggattgcaactagaaaccacaaagctgagtgtttattaaatatactaattttcctttcatccagttggccaatgttttcaaccataatctacttttctctaaatttttccatggagcaggatgatgattccaaatcctaaaattctgaaaaaaaaaaaaatcacttaatgaccactggtgaactcctgtaaactcatcccagaatcagtaatgagtatttggaaaagattcatgggtaagctccaattctcaccaaaatggccctttgagtagcaatcaaggattctctgagggaactgggaagttccagatggcttttaagggaggctatttggtttagtttaatagaacttggtgctattaaggccaatggttggagtcctttgtcctattctagtatatatatacatatacatacgtacatacatatatactccttactctattaatgtatttagaaagtaaatagtataggttataaataggcagaaaaaaaaacagtgggaatggcttagtgtgaaccattaactctatatattcattcaacatgaatttgctaaaagcccattaggtactagtctctggagacacatggtcaacttgaacaagaattggctttgaggaaataatggactaagggggatatataaacagataattgtgatgtgtgttttttgttttttttttttttaattatactttaagttttagggtacatgtgcacatcgtgcaggttagttacatatgtatacatgtgccatgctggtgcactgcacccactaactcatcatctagcattaggtatatctcccgatgctatccctcccccttccccccaccccacaacagtccccagagtgtgatattccccttcctgtgtccatgtgacctcattgttcaattcccacctatgagtgagaatatgcggtgtttggttttttgttcttgcgatagtttactgagaatgatgatttccaatttcatccatgtccctacaaaggacatgaactcatcattttttatggctgcatagtattccatggtgtatatgtgccacattttcttaatccattctatcattgttggacatttgggttggttccaagtctttgctattgtgaataatgccgcaataaacacacttgtgcatgtgtctttatagcagcatgatttataggcctttgggtatatacccagtaatgggatggctgggtcaaatggtatttctagttctagatccctgaggaatcgccacactgacttccacaatggttgaattagtttacagtcccaccaacagtgtaaaagtgttcctatttctctctccacatcctctccagcacctgttgtttcctgactttttaatgattgccattctaactggtgtgagatggtatctcattgtggttttgatttgcatttctctgatggccagtgatgatgagcattttttcatgtgtgtgttttttggctgcataaatgtcttcttttgagaagtgtgtgttcatgtccttcgcccactttttgatggggttgtttttttcttgtaaatttgtttgagttcattgtagattctggatattagccctttgtcagatgagtaggttgcgaaaattttctcccattttgtaggttgcctgttcactctgatggtagtttcttttgctgtggagaagctctttagtttaattagatcccatttgtcaattttgtcttttgtttccattgcttttggtgttttaaacatgaagtccttgcccatgcctatgtcctgaatggtaatgcctaggttttcttctacagtttttatggttttaggtctaacatttaagtctttaatccatcttgaattgattttttgtataaggtgtaaggaagggatccagtttcagctttctccatatggctagccagttttcccagcaccatttattaaatagggaatcctttccccattgcttgtttttctcaggtttgtcaaagatcagatagttgtagatatgtggcgttatttctgagggctctgttctgttccattgatttatatctctgttttggtaccagtaccatgctgttttggttactgtagccttgtagtatagtttgaagtcaggtagtgtgatgcctccagctttgttcttttggcttaggattgacttggcaatgcgggctcttttttggttccatatgaactttaaagtagttttttccaattcagtgaagaaagtcattggtagcttgatggggatggcattgaatctgtaaattatcttgggcagtatggccattttcacgatattgattcttcctacccatgagcatgaaatgttcttccatttgtttgtatcctcttttatttccttgagcagtggtttgtagttctccttgaagaggtccttcacatcccttgtaagttggattcctaggtattttattccctttgaggcaattgtgaatgggagttcactcatgatttggctctctgtttgtctgttgttggtgtataagaatgcttgtgatttttgtacattgattttgtatgctgagactttgctgaagttacttatcagcttaaggagattttgggctgagacaatggggttttctagatatacaatcatgtcgtctgcaaacagggcttatgatgcgtatcatagtcttacagatttatatctacctttactaaaagaagaagaatgttgattaggaagtggcgtttattaagtttattaagtttagtagtaatgagaattattataatggtggttgcaattaccataattcattgatcttttaatgctaatcccagcactatggcctgtacgtgaattattctattcaatctaacaaacttgtgatattggtgatgatgattatgattatagtaacagaaataatggggaatataaggcacatgtattaaacgttattttcaagttactgtattgggtctttcaaggtattattttattaaatcatgccagcaactctctgcagttggtattattatcaccatgttgaagaacagtctgatgccaagagagtgtccacaaattttccaagaatgtacaatgattaggtttatgatttaaaatctgggctagatgaccccacagttcatacccctaagtacaggtctaccttgtttcattgtgcttcacttcacatatactgtattttttaaaaatattgaaggtttatggcaaccatgcattgagcaagtctataggtaccatttctccaacagcatgtgctcactctgtgtttctgtttcacattttggtaattctcacaatattccaaacattttttgttatcattatatccattttgatggttcatgatagtgagtttttgtttgtttgttttttgtttttttagacagagttggtgtctcagcctacggagtagctgggattacatgcatgcgccaccacacctgcctgatttttgtatttttagtagagatgaagttttgccatgttggccagactggtcttgaactcctggcctcaagtgatccgcccactttggcttcccaaagtgctgagattacaggcaagaaccaccacacccggcctgattagtaatttttgatgtcaatattgtaattgttttggggggccatgaatcaagctcatataagactgtaaacttaataaatattgcggtcagctccaatgactggccattttgcctctctcttttttggcctgcctattttctaggatacaacaataatgaaattaggccaattgataaccttacagtggcctgaaagtgcccaggtgaaaggaatagttgtacatctcacttcaaatcaaaagcaagaaatgattaaactcagtgaggaaggcatgttgaaagtcaagataggccaagagctaggcctcttgtgccaaagaatttggcaagttgtgaatgccaaggaaaagttcttgaagcaaattaaaagtactattccaatgaacacactaatgataagaaagcaaaacagccttattgctggtatgaagacagttttagtgctccacatagaaaatcaaatcagccacaatatttgcttaagctaaaacctaaccctgagcaacaccttacctctctttaattctaggaaggctgagagaggtggcaaagctgcagaagaaaagtttgaagctagcagagattggttcatgaggtttaaagaaagaagccatctttatatcacaaaagttcaaggtaaagcagaaaatattgatatagaagctgcaacaagttatccagaagatctagctaagataattgatgaaggtggctataataaacaatagatttagagtgtagacaaaacagctttatattggaagaagatgccatctaggactttcatagctacagagaagttaatgcctggcttcaaagcctcaaagaatatgctgactcttgttatgggctaatgcagctgttgactttaagttaaagccaatgttcatataccattcctaaaaatcctaagatttatgctaaatgactctgcctgtgctctataaatggaagaacaaagcctggatgactgcacgtctgtttacataatgcttcactgaagattttaagcccactgttgagacccactgctcagaaacaaagatttctttcacagtattactgcttatagaccattcacctggtcacccaagagttctgataatatacaagaagattaaccttacttttatgccctacgaacacaatattcattctgcagctcatggttcaagaagtaattttgactttcacatttcattactgaaaaaaatacattttgtaaggctgtaactgccatagaaagtgattcttctgatgaatctgagcaaagtaaataaaaaacctggaaagaattcaccattctagatgtcactaggagcatttgtgattcatgggaggatatcaaaatgacaacattagcagaactttggaagaagttgattccaactctcacatataaataactttgttcaagacgtcagtggtggaagtaactgcagaggtggcttaaataggaagaacactagaattagaagtggattctgaaggcatggctgaattgctgctgtctcatgataaaacttgaatgaaaaggagttgcttttatggatgagcaaagagtggttgcttgagagggaatctactctttgtgaggatgctgtgaacattgctgaaatggcaacaaatgatttaaaatattgcataaatttagttcatcaaacagcatcaggtttgaaagaattgtctccaattttgaaggaagttatactgtgagcaatatgctatcaaacagcatcacatgccaaagagaaatattttgtgaaaggaagagtcaatcaacatagcaaacttcattgttatcttaagtaatttccatagccaccaaaccttcagcaaccaccaccctcatcagtcagcagccatcaatactggggcagaatctccactggcaaaaagattaggacttgctgaaggcttagatgaccattagcatttttaaacaagaaagcatttttttagttaagctatgtgcatttttagatttgaaagacatttctcaaaagaagacatacaagtggcaagcaggcatatgaaaagatgctacacatcatccatcatcagataaatgcaaatcaaaactacaaggagatatcatctcacaccagttagaatggcttatatccaaaacacaggcaataacaaatgctgatgaggaagtggagaaaagaggacagtcaatgggaatgtaaattagcacaactatggagtacagtttagaggtttcacaaaaaactaaaaatgagctaccatatgatccagcaatcccactgatgagtatatattgaaaagaaggtatatcagtatattgaagagatatctgcactcttatgtttgttgcagcactgtttacagcaactaagatttggaagcaacctaagtgttcaacagatgaatggttaaagaaaatgcggtacatacagacaatggagtactactcagccataaaaaaaatgatatccagtcatttgcagcaacgtggatggaactggagaccattatgttaagtgaaataaaccaggcacagaaagacaaacatcgcatgttctcccttatttgtgggatccaaacatcaaaacaattgaactcatgctcatagagaggagaaggatggttaccagaggctgggaaaggtagtgggaaggtggaaagggaggtggggatcggtaatgtataaaaaaatactggaaagagtgaataagacctactatttgatagtacaatggatgattatagtcaataataacctaattgtatattttcaaataacataaagagtgtaattggattgtttgtaactcaaaggataaatgcttgaggggacagatacaccattctccatgatgtgtttatttcacatttcatgactgtattaaaacattttatgtaccccataaatatatatacctactacatacccacaaaaattaaacattaaaaaaagatatgtacatttttaagacacaatgctatgcacttaatagtccacagtatagtgtaaaagtaacttttatatttactgggagagcaaaaaaaattgtgtgacttgctttattggtatacttgctgtatttcagtggtgtgtaatcaaacccataatatctcagaggtttgcctgtacactaagccaagctgtcttctgagcagggtaaacactgaagggtgtcaggtagaaaaataaaaggaacacattctaagaaaaggaagttttttaaaaaatagttttgtaaaacagtatgttagagaggtcacttaatgagaatgtatagtgcatgaaggaaaacagtggtaaataaagcccaaaatataaattagtttcaaattataaaggaatgtgtatttgcattttatcctataagttgagaatcaaaggatagtcttccaagcaaggaagataaagattcacatctacattttttttttttgagacagagtctcgctctgtcgcccaggctggagtgcagtggcacgatctcggctcactgcaagctccgcctcccaggttcacgccattctcctgcctcagcctcccgagtagctgggaccacaggcgcacgccaccatgcctggctaatttttttgtatttttagtagagacggagtttcaccgtgttagccaggatggtctcaatctcctgacctcgtgatccacccacctcggcctcacatctacatttttaaagaaaacaccagatcaaacaaaaaataaaaatagttgacgtgagtgggtaacccaaagtatgctaaggttactcagaatttttgaaaatctggtttaagaattctcctgtatctgaatatcccaaatggttcataaatataagtaaatagcttctgtcacacagtattcttgaggttctttatctctctggtttggattggttcccatgttggttatgtattgagagataacatccagaggtgaaaacatactctactgagtagtgttgacataaaattaacgaaaattgttggagaaaatcagcttttggtgaatgtctgagcagaaaatctgggctttgagccctaggtaaacttactttcccacaccccacttccatagagtagacatattggaatagcctaaaatatctatctctaaaatggtacctttgaaacattctaaatttattatttcattctttcatcctcacccttaaaattttcattccaactctgcatcactggcttttaaaagttctccaatgccggccaggtgcggtggctcatgcctgtaatcccagcactctgggaggctaaagcgggttgatcacaaggtcaagagatcaagaccgtcctggccaacgtggtgaaaccctatctctactaaaaatacaaaaattagctgggcgtggtggtgcatgcctgtagtcccagctactcaggaggctgaggcaggagaatcgcttgaacctgggaggcagaggttgcagtgagatgagattccgccactgcactccagcctgggtgacagagtgagactctgtctcaaaaaaaaaaaaaaaaaaaaaagttttccaatgcctcaagaaactcctaatggtattctcaacttataaagaaggaccaatctctagaactatagacttctgaaaaggaaaatgaaagaacaatctttcttccttctttcttctctcttttcctttttcttactcttctttctgtcctttcctttcttctctccctccttcccttcctttctggtatacttcctttctcccttccttcctcctttcttcttttattcatttttctttatttcctctctctttttgaacttttctactcatttcttttctacctttatgtagtgaaaatgcaaatttgctcacatcacaattcagacatgcaataaaaatgtagcctgcttatttcatcatcataatctcccctcctgttacttttcaaaaaagatttaaactaaacttaatctacaagtttgaaacttactttgatctaataatttaaaaaccttttgatttttttttaccctatgatatttacttttagattcctccattttctccagtctcttttctgatttaggtgcatgaggaaaaagctaatggctttggaaggaaattttctcctggcctcatagtgctttttggtagtgttctggctagtagccactgaagtacagttggtccgtcatgttttaggcactctactgggttttctgcttgctcctgaattactcctatgtccaattatcctctcctgactcagagtcacataaattcttcctgctgacccagccacccttagctctcactgggatgaatatctctctgaaattctctcatagtctccatttggactgaagcttctgctttgggagcatcttacctataccactggcataataacaggtctgttgactttcaattcagtgttcatgccacaaagaaaggaggggaattgggtactacataatctttcattctacagagcaaagacttggggatatatataagctacttcctctttcttactccttctctccttcttttactaacctttggcccaaaagaagcagattttgttttcctctctggtctagatgaaacatctccctaaatcattcatacttcatgaagtagcatctacgtaaatcatactgatacatcatgaagtagcaactaccttcccatttcctcctattgtctttatttagaatgtagtgctaggagaaataaaaatgtcttactatcaaggaacttaaatttagaagtagttagaaatatattatcacttctgtttctggctattagaaagtagtggtggctagaattattcccttatcatacatgctagaagactggacaaaagatagaaaacaaacatttttaatcattggctaatatgcagtaggactgtggttcctgtaaaaagggaaacaaatgaagtaagccctggaatcacgcaggctttctactgggaggcaatttctagaatgcttcatagggaagggcagctcaaggattaagagtaatcttgctgagtagctaagacagagattgcagtttatgaggccaaagtggttaaaatgtatatagttaagagagtacctgagaggagtgaacttaacaaagaacaagtaccagaaatctgcaaagggtttccttaaaattcttgactgatctaggcttagagtgaaaacttcaggcttatataaagaacttctggacaaagaagttactggggaatttcatgccagatgattcctgaacacatcattttagttcccaccagccatagtggaggggctttattgaatactggaggcattcactagagatcccagaattttcatatcttagaagttaggctaaattagctctgaagaaaatactactccagagtcaccctgaaaagcataaaaacaacttcaaagggaccaaacaaatctgcaaatagtctaacttcctgccacaagaaaaggtagcactcttcaaagaagtataaaaaatacactacttacaaatgtaacattctcaaaaaatactatatgtacaaagaagtagaaaatggggactcataactgggtgaatatcagccaatataaacagatccagagattaaaaagatgataaaattagcagacaaagacattaagtatacttttgtaaataagcttcataagttcaagtattgaaaataaagcataaatataatgaggagagaaatgaaatataagataaaaaagaaaagcaaatggaacttctagttgtaaaaacatatctgaaattaaatcccataggatgagaacaataatacttcagaaaaaatagtagtgaaaatgaagatataacaatagaaactatctaaaatgaagcagagaaagaaaaggagactgaaaaatatgaacagaactttattgaccttttggaaagcatcaaggagtttaaaattcatgtgactgaaatctaagaaagggatctgaagaggcaatggctgaaaaaattttaagtttgatgaaaaccatcaacccatcaatctaaaaagttcagtgagctcaaaagaagataaatataaagccacataaggaaatatcatgatcaaatttttaaaagcaaatattatagaaacagtgaaataaactaaacaacaacaacaacaaaaacttattattctatacccagataaactatctttcaaaattgagggtaaaataaaaccatctttagacaaaacaaaaagctgagaatatttgttactagcaaacctatgctataagtaatgtgacaggctggatacagtggttcgtgcctataatcccagtactttgggaggttgaggtgagaagatcacttgagcccaggagtttgagatcagactgggcaacatagtgagaccctgtttctaaaataaggaaagtaagaaagaatgaaaggaagaaaagaaagaaatgttataggaagttctttaggcctaaggaaaatgagccccaactactggtattcacatctttgtgtagtttcttcccacattgcatcatgtttggtctgtctaaccaaggaaatatggctgatgtgatggtatgtcacttccgagattaggttataaaagacaagtctttctatgcctctgtttctgcctgtctcttctcattaatcactctgcgagaagccaattgtgatgttataagaagactcaggcaacctacgaaaaggcccacattgtaagaaactgtggtttcagccaacaggcatgtgaatgagcttggaaatgaattctccagccacagatgacttcatccctaatgggctgatatggtttggctctgtgttctcacccaaatttcatcttgtagcttccataattcccacatgttgtagaagggacctgatgggagatgactgaatcacgagggtgggtcttttccatgctgttcttgtgatagtgaatgggtctcatgacatatgatggttttaaaaacaggagtttctctacacaagaactctttttgcctgctgccatccacataagatgtgactttctcctccttgcttcccaccataattgtgaggccttcccacccatgtggaactacaagtccaataaacctctttcttcagtaaattgtccagtctcgggtatgtctttatcagcagtgtgaaaacggactaataaatgggcagtatgactacaacctcttgagacaccctgaccagtacatccatctaagctctcttggatctctgactgaaaaaaaaaaacaaaactgtaagatagtaagtatttgttgctataagatgctatgttttgggggcatttgttatgcagctatagataactaacatactttcaaattaattctacaaggcaacattatccagaaataaaatacacccaatattcttataaaaaagattcaaaatatttaataaatactagcaaatcaaatagagcaatatataaaatgtattacagtatgactaagtgagttctaccccagaaatgtaagtttatctattaatcaaaatgacacaacaaaatttactgtatttacagggtaaaaaacaaacaccaaaactaaaggattacctcaatagaggcagagtaagcatttgaataaactcaatatgtattaagatacaaacctctcagagccctagaagtagagggagcttttaacctgataaaaagcaagcaagcaagtgacaataacaacaaaaacttttgttaactcatatttaattgtgaaggactgactgcattttccatgaaatcagagagaaggcaaggttctttacttcttcactttttttttttgaaatggagtttcactgttgttgcccaagctacagtgcaatggcatgatcttggctcactgcaacccctgcctcccaggttcaagcgattctcctgcctcagcctcctgagtagctgggattataggtgtgcaccagcatgcccggtcaattttttgtatttttagtagaaacagggtttcaccatgttagccaggctggtctagaactcctgacctcaggtgatccgcccgccttggcctcccaaagtgctgggattacaggcatgagccaccgcatccagccctggttctttgctttcataatttctattcagcattatactggaagtcctatgcaatgaaataacacaagaattcaaacttataaaaaaataaaaattgcctttattttcaggcaagatttagaagaaaccataggagtaaatatttgctattgggaatagtgaaaaaaagttcttaaataagacacaaaaaagtataaaccatgaaagtaaatattagtaaatatacttcatggaatttaaacatttctgctcttcacaatatattcttacaaatttgaagggcaagctatggactatgagaaaatattttcaataggtacgtctaacaaaggacttgtatctagaatatatatataagaacatttacagcttaaaaataagaagataaactgctcaataaatattggcaaaaaattttagcagacactttacaaaagaagacacaaatgaccaataagcttatggaaacatgttaagcatcattagacatcatgaaaatacaaattaaaaccatagtgagatgccactgcacaaccattacaacggctatgattttaaaaaatgattttaagttttggtgagaagtgcaacaactggaaactcaaatgttgctaatgggaatgcacaatattttggaaaagtttggcaatttcttataatgttcaacaaatgcttacaatatgatccagaaattccactcctacgtggttaccctagagaaatgtaaacgtctgtccacacaaagatttttacttgaatggtcccagcagctttattcataataactgataacataatataagtgaaatgacctaaatattcattaattggtgaatggataagaaaagtgtggcatatttttttttttttgtaatttcatttttatttatttttattttttttttttaatttttttttttattatactctaagttttagggtacatgtgcacattgtgcaggttagttacatatgtatacatgtgccatgctggtgcgctgcacccactaacgtgtcatctagcattaggtatatctcccaatgctatccctcccccctcccccgaccccaccacagtccccagagtgtggtattccccttcctgtgtccatgtgatctcattgttcaattcccacctatgagtgagaatatgcggtgtttggttttttgttcttgcgatagtttactgagaatgatggtttccaatttcatccatgtccctacaaaggacatgaactcatcattttttatggctgcatagtattccatggtgtatatgtgccacattttcttaatccagtctatcattgttggacatttgggttggttccaagtctttgctattgtgaatagtgccgcaataaacatacgtgtgcatgtgtctttatagcagcatgatttatagtcatttgggtatatacccagtaatgggatggctgggtcaaatggtatttctagttctagatccctgaggaatcgccacactgacttccacaatggttgaactagtttacagtcccaccaacagtgtaaaagtgttcctatttctccacatcctctccagcacctgttgtttcctgactttttaatgattgccattctaactggtgtgagatgatatctcatagtggttttgatttgcatttctctgatggccagtgatgatgagcatttcttcatgtgttttttggctgcataaatgtcttcttttgagaagtgtctgttcatgtcctttgcccactttttgatggggttgtttgtttttttcttgtaaatttgggcaaggacttcatgtccaaaacaccaaaagcaatggcaacaaaagccaaaattgacaaatgggatctaattaaactaaagagcttctgcacagcaaaagaaactaccatcagagtgaacaggcaacctacaacatgggagaaaattttcgcaacctactcatctgacaaagggctaatatccagaatctacaatgaactgaaacaaatttacaagaagtgtggcatattaatacaatagaatattattctgcaaataaaaatgaaccaactactgatatgcacaacataatgaatgcattattctaagtgaaagaagccagagtcagaagactacacactatgattaaaattttgtgaaattttagaaaaggcaaaactatagtgacagaaacagataaatcactgccaagagcctgagggagtggagaaggaatttattgcagagacaagggtattttttgcagtgatagaaatgctctatattattactattgtagttgtggttacatacatttgtctaaactcattgaaatatgcactcaatcttggtaagttttattgcatgtaaacatacctcagtgaagctgacttttaaacgttatacacttgttgagtgatacaattttgaacgtcactgtacaactaatagaaaacaaagttatggcctaaaatgggccattttttcaaccaatatagatttatcacttattatgtgccaaaggctagtctagttattcaagacaaagtgatgaactagacagtgagtgaaataggtgagtaaacaggaaatttaaaaaataaagaaacagtgtaactgatatgataatggtaatcacaatgctatggattcagagagaagaggtacccaactcagccttggggccaggaaaggtagtattagagtggaaaacagatggaagaatatgtaaaagggatgggggtgtgggaaatgatacaaggagtgggtaatgtataccttgaacttggagtgagagagcagagggtggcctgtgagtaaacctgaagttagacatgagtaggcttattcaacgtacagttgagaaacggaatttggagaatttaataattgttacatgtgaaaactgaggcaaagaaggaggacaaggatgttattacttttctaaattgattaactgggaaaattatggcactattcattgaaattgaaatacatgagcaaagaaatgggcttagtgaaaggctgggggagaagaagggagacgttataaatattgaatataaagtacctttgagatatcccagcgcagtctgtaaaagaccattgaaataaagcctggagcacagaaaactgacttgagatagagatacaggtttgggtaaatgaactcattgaaatcatcacaaaagagcatgagatcaaccggagagatggggaaacacgaaacaggaaggcccaagatggtcgaagtttgtgaccgtcaaacatcatggtgtagccataaaataagtacttagtaaaaagtattgttattaccattacaattctggctgtaggtgacgttaaagccccaaaacaaagcatcatgctacctctacatgctaatgggatgtagccactagagaagggatataagtggagtgacattcttctgaacatcaaaaaggatgagatccagagtatgggatccagtttttggtaagataaaggacattcctttcggtctatcaggagcgtggaaggaagtaatgagtgaagatgcaaatacgtgtgtaacttttatgacacaaagttgagggagctttgactgatggcttttgtttttttctgtggagtcaaggtcatacggagactaagggagagaggtgggagtcataggtttgagagcaaagaagacagtttgaaatatgctgcctcagaaaaggggaaagtacttcccatagaaacataatagatccctgggcattattaaggacctagttaaggttgaggaccatgaattaagagcatttccaattgagagcgatttttttttttctttccacaattactcagcaacccaactgcaaggttgagaaaatagcaagttgagtttattcaggtttgaagttttacagatgactcataataagataattacaacttaagaaattaaagattttgaagacagtaattaatgtgattatcaataaaatcttagctagataatgagagaagtggaaacaggggagtcctgagaagtaaggagaaagtaaaggagtcggtaaactggaagttcctagaaggcctataaaatagtatattggggatcagtgaattgggataatgtggccaaagtgaagaaattgagaccataggggatgaagagggcaaggaatctgcaaagctaggttgttgaaaggatcacccaatgccgaaatcaccaataatagcaatgcctgtggtgggagaagatggaaaggcagaggccaatcttcagagaatttagaggattggccaggacataaagtcttttgatcaagtgctaaggagtaccccaaggtggaatcacaggcaaacactttcagtaagtgggaactgtatggaaggagtgaggaaatctaatccagaagtggtgatacaagccgggagaacacggactcccaaccttcagtgacatgggaggtgggaggaggaacatcctccccatgagtggtctattgtgtggcttgaataagtggggtttatggagagtttcctggctcaatgttgctgatatgcataggaggaatagagtctttttggtgattggagacccttcaggatggatgagggagcagacagcctggtggtgaaggtgatgagctctgctgcattctccaccaatgtcagtggccattctctcagtctgagcagtagtgaagtaattaaagctctagcatcagtcaggcctgggtggagcccaggttctgctcatcactcactgcatgtgggaccttctttgaattccaggttcttcaactgcaaaatgaggataatattatttacctcaggattgttttaaaactccaataaagtgttcaaaaaaaaagtttatggctgggcgcagtggctcacgcctgtaatcccagcactttgggaagccaagacgggtggatcacgaggtcaggagatcgagaccatcctggctaacacggtgcaaacccatctctactaacaatacaaaaaattagctgggcatagtggtgggctcctgtaatcccagctactcaggaggctgaggcaggagaatggcgtgaacccgggaggcggaggctgcagtgaaccaagatcgcaccactgtactccagcctgggcgactgaccaagactccatctcaaaaaaaaaaaaaaaaaaaaaaaaagtttatgataggtcagacagcattgtgtagttataaaatgtttattaaggggtattgttgttactactatttcaactctgagtacagatgattttggagcccaaaaataaagtattatgcttaatgagataaactttcacttaatctggatgatgaaggtaaaagtatactagtttgccaaatgaaaaagatgaaattctttagataatgagacctttatttctcaagatagatctttaaacaatgtaaaatgtcaaagaacctaatcatcagagttatttttctaccttcttcaataatgggtctggaaatacagaatgatttaacttttcctgtgttgacaagagcaaagtgtttggaaaggggagctgggggagagaactgtaaggccctgaactctttacaatgccccagccctggttatgcagtctgccgaattttgatgagagagctgtattcctgtaagagacatcatcgtccagatgtagatgcactgccgtgatgtccaaataggaaacaaagaccacttggaagtggatactttcctgaacttactgctctgatgaggggcccttcttttgaagcaaaatgagtcttcatgtagctgagaactctcttctcctatcactttacaaactctatcttcccccaaaggcctttccaaaggaagcagccaggctcagtggccatgatgttttcctgaaggtatgggagatagattatccagttaaaaacacagttatttccctaaacctgacttaacctctgcatataactgcctggagcctattcaacgcagttgacaattgcctgccccggggcctccctctgtcctgaaattacccatttaaatcttcctattttttttaatccctaatagtctgtggcctactttttgttgtttacgttttgtatgtttttcaaaaccccaaagatttgcttcaaattctactcattcatttattttgtaaataaatgcattcattcaatgttgtcgtgagttgggagggagaaatgtctgactgttcatttttctgccaaatgattatatagaacttaatagtatgcattatgaatcagactgcttgggattgaatcacaggtctgccactatctatgtgaccttgagtaagttgtttaacctctctgcacctcagttcccatctgtgaaatggggatataataataacttcatggagttgttgtgaggattaaattaattcataaatacaaagtacttaaaacggtgcctggtgcagcttaagagctatagacaactttgctattatttatctagtgatcttagcatgccccattagaatggaaaggggtggagcttcataaatctttttgaagtgagatcttcaagacatggatgctgatagatgccagactatcatggatgcgagtctcagcatctgatgggataagaacatggtttatcatttttgatcctgaatttgaataggtaagagatgagtaatgagaaaaaagaagggaggaaaagaagtctgcaaaatagagactgagaccgggcaatataaagggtttgtaaagcatcttgatagtgagatgtctggaggagatttctaaacgggttctgttctgctctttgatagttgttttgttggtggctatagagatttttttttccccctgaagctcctctccccattattgtgtgaagttcactcttcttgcaaatgtgagtggagtttttagaaattcaaagcaatagttgaattttttctccagctaagtcttctagactaaaacagagatacccatctagaaacaaatattgagagacaagaggtgctgggttttctgaaaatttgccaaagtactggagaagatgtctacaggctgcacagttggggaggataagaagctaattttgctgagatctcaaaggtcagcgagaccctagataaaatctaaaccaacatttactagaagcagctgtgtagtagtcatttcccagaggtctgagaattaagacctatcactagcccttctgtgttatgttagcgagtaaccatgttacgtgcctagtttagggtaggatgatattgatgggtggagaagtcagagaagggtctgctcctctccttgattcatccactcaccctcttgctttgaacttctccaaatggctgaggttttagactttacactggtggaatttcatatacaatcacataataggcacataaaatatatttcatctaatctttctaacagccccaagaggcagatcatactgtcttttcaaaaaaaaaataacagtaaggtgaggagattcatagttataggtgtgaacgggctttaggatctgataagccgaaactggattgattgatagctttgcctggtcctatctgtaggtccttgagcaaagtatctaacttctaggagcttatattttctctgaacaaggagatcttgaaggattgtgtaacagttacaacagagtgccagttgttggaaaatacctacaaaatggtggtgttactattttcttattcttttgcacttttttttatatccatagatagtaaatgctcaacaattcagtgatgaaattaagtgaaattatcttcctaaactaggctactatagtcctgttaactcctgcgtgtagtttacaatgaatccttgtgtcccttgtatggaaaaatctgcttaatttatcagctctgccaagttcttacaaaaacaaaagaaaaggtgaagaagcagaaaaacaaatggaagatatcctttctgtagtcttttactgttgacatagatttcctctgcagaagagaaaactatggctttaaaactgggatgattcatactcaaaaagaatcagagctggtctggtatgagttggttatggactgaaagggttaggttatgtcaaaacttttcatgagctagtacaagcaggattctcttgtttattgttatattttaaaagacattccaggtaataaagaaagaaactccctcagcatgttctggctttgggcccctgtctcggtcatgttggtgcggcaatggagtgggtgtctatctcccagatgtgtaagtgcagaatgggttgcaacctggattcttgattgagaaaccttctgttcctctatagatgaaggtctatttccttcctcctgaggcttaaatggggaggcatggaaagcctcacacaggactgacctggataaaagggtctttgtgaagagaaggcaatttatcaactgcagggccatttcagggaatgatttaactgtggtcactgtgctgttcacagcaactttacatccacacctatagccccaactttgccatcaatttgcaaacacatacctgatggacacctatgctgatctgatgttttggggggctttctcttgggttccaagtatttaattttattgcatttgaggaactaggaaggagggaggaaaacgtttaaaaagagagacatttttagggaatttagccaatgttccaaagagccatgttgatgaaatggagcagtttaagtgaaaacaaattgagtttggaaaaaaaaaaaaaatttcctccacccagtggcatttggagcttccattctgagttacttctaacttcctggagccacgtttactttgctgagcagactaaatcatttaagttgtcagcttctccctgtccttgccagacctcactcaaggaatgcttccagggccatgggagctcacaaaggcctcagtctgcctgagtcactctctggggaccacatatccacagggcaagtttctctgtcctaatttaaggcttctcaaagtcaggggagagcctttctgtttccatccacaaaataggtcagaaggatatgataatagcgataggtagaattttatttagcgttccttgtgtgtagcaagtaccatgttgagagctttatattcattaattaataaactcttcacaaccatctgatatgggaagctaataatcttctggttttatagacattcttttttctgagaatcagaacaaacaacttgatcaagattatgcagcagcattgggcttcaaaaccaggtggtttgtcttaaacttagctcctaatactcagctctatttctctggggacattggatgttattgcagttccccaccatgcagctcactcagcaccagggtatgtgctgtatggggtgaggagagggggaggagaagggacagctgtgattcaattagcacaggtctctgctaattgcagagaaggagcctaaattctagaggggagacaagtgtatgaacaaaatcatcagagcagagtgacagagtgtctagaagtactaaagagggcttagtacaaagtctagatgtactaaggaggaatgagcaattaggtctttctctgagtaaggaaggggctttgtaaaggaagacttgaagagaagatcatccttggacaagaacttcagcatagaagaagtttatctaaaacatgattgacaacgagaccagcaggggcaaaaacacagagagatgtggacgagaatggtgtggcagataaatagaaggagcctagaattgctctagtgtcaactgaaaggtaatagaatgctaatcagtatctattttttttgcctcctttgtaattaggtgaagcagtattctgatttcatttctggatgatagaataggacaggaaattatatgcccatctaccaagtctggctcatcaacccttcaataactgatccttttcctttctccccatattctggcagacaaagagaactcagaacccaaaggacccacaggaccaaagaaaacaaggtctctgaattattgccccaggcaatcacccctctctcagtggacacacttttattgtgttatgctgataaaatttggggattattcattctagtgcttagtctacctttactaatcatggtggttgggaaaggaaaatgatcactcagagccttatacatggaatgaagaggttaggatttatctttaaggagattgagagctattgcacagttttaagcaacagagtggttcagatctgtggctcaggatgtttgttctgaatgctgtgttgtctgaatgggttggcgctagatggtgggaatgggagacatgagtggctaatggtctatctgcgctgctctcaagggtatgcctaactcctactccatctgcgctgctctcaagggtatgcctaactccatcattttattcaatttttgtacactgtggacattgcatacagtggcataaatggataaatgacttcatcactaccaatgattttatgccagtcatggagcttggcattgacgtgcatcatctcctttaaaacttgccagaactcaggagataaatatcatgattctcctctaacaggtgaggaaacagaagcttggtcagtttgggcaacttcctcaaagacctgcagtctttaaattcttgagctgaggcttgtactcaggcttctgattccagagtttatactcttttcattaacctgcttgctgagtaacttttttgtttgtttgtttgtttgttttcagatggagtttcactcttgtcgcccaggatggagtacaatggcatgatcttggctcactgcaacctctgcttccagggttcaagtgattctcctgcctcagcctcctgagtaggtgggcttataggtgcccgccatgatgcccagctaatttttgtttcattagtacaaatagggtttcactatgtcggccaggcttgtctcgaattcctgacctcaggtgatctgcccgcctcggcctcccaaagtgctgggattacaggtgtgaaccaccgtgcccggtttgagtaacctttaagtaagaaagtgccttttgggttgagtttaacaatttccatggtagagagtctcttctgctatatgctgtttacttagcttctgcctagtatatgcagcagcagaaaatggtttcccttgttgtaggtctaatgagatttagaacactttgggtcctcagatatagtgagcaagattttcacttcatagatgaaggaactgcagcctaaagaattgggaagaaaaggtttatccaggcttgctgtgcattccttcctttctctgggaattcccttggagaagaaatctggctgatcaaatctccttgtaaacatgctgtgaagactctggggaaaaccactaatgatatttgttagtggcagtctttatctttgagagacttttagcagcatgaaccttacccccgtagtagaattgtatatggtaaacaaacctggaatctaaggattcatgggtaatggcttcttgaaaagtgtcaagtaagctatgtaactatggcaggagatggaactacttcagggttaaaaaagctggctttcatttcgtgcaagtaatgtacttgtgtacatcttttggagaaccatatgttaaatccgaatcagaccaagtcctaatgtcgtaagaaaagggctgtggagtagtattggcagtcctgggcttttccctatgttccctgtaccttgtgattacttatagctttgacattattagtaaagtttgatacttggtaaaatattttattcttgtgggtctaatttgaaaatctagcccttgtgttatctccaacagatactgcctgatccaagatcacaaagttgggcagcaatgaaagatctaatctcagacctcttctctcctgtatcccaaaccagtgcaacaatgaggtttcctctgttcctacatatttatttctacatcttcttacgtggtttagaatgatgatgatgatgatgatgatgataatgataaaatcagcaactacctttaatttaccttactatgtgtcagacatagtgcttctcattatataaaaacagtataagcaacacatctatatgtaaaaactctcacgtcgtgaaacatatgtatagagaccctatcgggttaaaccttatgaaacttctaatatgtatttaacctacaaaacaggaatgtcatttggctcaatccaatataatatgccaggtagtttaaattaggtggacaagaaaggcctctgaagatctgagatcgaacaacgggaacttggcatataaaagttcagaaaagagaagaacctatgcaaagggaatcttctgcttcaaggactctgaggatgggaccaggtgcagtttgagcactgagagtcctgttatggctgaagtagagtgagtaagacagagtggtacaggttgagttgggatgggtagacagaaataagaccattgagctttggaagtaggagtaaagagtttgagttttatactaaatgggttttgactggggacagagaggaaaaaatgagatgtgattgattgattgataatttattatttttatagatttagggggtgcaagtgcaaatttgctacatggatgtactgcattgtggtgaagtctgggcttttcgtgtactcatcacccaaattgtgaacactgtaccatataggtaatttttcaaccctcatcctcctcttgccctcccacattctggagtctccaatgtctagtcttccacactgtacgtccatatttacccattgtttagctcccatgtactcatcacccaattagtgaacactgtaccatataggtaatttttcaacccttatccccttcttgccctcccaccttccggagtctccagtgtctagtcttccacactgtatgtccatgtgtacccattgtttagctcccacatactcatcgcccaattaatgaacactgtaccatataggtagtttttcaaccttcatccccctcttgccctcccaccttctggagtctccaatgtcttgtcttccacactgtatgtccatgggtacccattgtttagctcccacgtataagtgagaacatatagtacctgactttttgtttctgagtcatttcacttaggataatgacctctagctccataattttatttttaaagagtttctctagctgccaagtggagaatgggctatagggctataaaagcggcagcaaggagactatgtgggctgttactgtagtgggcaaggcaacagccaatgaaggcccagactagagtgatagcaattggatggagataactctgcagatgaggggtttatttttgttgcttgtgacaggcaagttcccatgctccctggtagccaccttatgaaaggtcttgttgatgtttcagagaacatttacaaacaacatctcagacaaggctgtggaaacaaacaaggggtttcactcacttactttgatgtctgacttgtggatacaatactgtaagttaatcctctcctttgtctcagagaagggtttgctttgggtagcttagagcacttgacaggaggcattttgtagcagccctattacccaaggggtataggaaaagctacagaccagaactgatatgctcttctctagaaaatgaaactgcttccagatccagagataattagacaaatgtctcactgctgcagggagcaagaaagaagggctacgatgggcagattcttggcatagctcttcaggatgtacaaggacttgcccagtgaccaggagagtaggggccactgaggaaaacaggctaaattaattgaatgatggggagaaggatgaggaggagaggaaagggagattggaatctgggactgcgcccaggctgcctttgtatgcgagttccctaacaacgctttctgagggaagtcagggactgactgaagcttaattcagattctctgaatgtgccttaaggagacagactgaggaatggtctgatgaaatgcaggggaagcaaaacttggcaagggcacagtggcaaatgagctgagaatatggggggagatcctgccaagacccccttccccccaggaccacccttggtgtatccggagaaatcaatcaattggacgggaatggatggctcccacaggacagcagtgggggacccctgtgagagctgggggtcttccatttacagacaggatttgggcctcaacagagcattaagatgggtcagtgcaggcataggggacgccctgaaagtcttgtcatatcctgtggatgactcaatggtgccaaaagctatgcccattcctggactgtgcccagggaaattatagtcttgcctcccacttcgtgtgaaggccctggggcaggaagcgtgacatggttccaatatccctacactgggggcatttgtaagagccttgtagagagttcacaaaaatcattaagtctacaaaacatcccttcctgatgccacctctttcctctcttgggtatttgtagtattctcctctaaatatctagctggatacattcgtgcccccacttaggcagccaaatcttcattcactcccttctggggtcgtctgccagatttgttgaaattaaaagttggaaataacttgatatatgtaaacttcctcctgcacctcctatcaattttataaccaaatgtaagaaaagcttttataatatccaaagagctttacccaatatatctctgcatctcactcaaagtttgtgaagtagctattattatccccaactgacttgtgaaaaacaggctcagagaagcagaggcctgcccaaagtcacactgtaaatgtcctgaaacagaggggcctggaacccaggtctcctagtttctatccagcctactcacccctgtacaatgctaccttcattatcttactttttattccactatgtcaatgggtaaaacagaataaaataatattcccttgttcccatgtctacctaaatgtggatgcagtctctagtatgctttccttgaactcagtggagacaatctttcatctggaaaaaattcattttttaaggtttccagtctcattgactgccctctccaacctcatactttctgatccaacactactactcataatgatttaaataaaccccaaactgttatttcacactactgcatgtttctttgttaaggctcttttccctattccaattgtccttctctttgaatagaaaacttctatccttcctcaagccctagaaatctacccttgacctccaagtaagtcaaatgggttgtctgatcccatatcccctctctatatgtacctcatcatagcactcactgggctctcttagaattgtctctttaaatgcctggcctcttcctctggcccagaagccacttggggacagggactttctatctccagcatctaatgcagaatttgaccaataattgcaggtgcttgggaaacatttattgccttgatcagaaatcacaaactgacaaatagtttctagttattaaataatcatttatcactcccagaaataatgccattggaactttcttataatcttgcatacaataaaatatacagattctaagtattcagttagatgagttttcacatttatatgcatctggggaaccaccacctcaaagaagttatagacatgttttttttgttgttgtttgttttccttgcttccagcccacaagagcagtctgttaaacaccttggccaaggctaagaatgtcagttttaaattaatatctgaatatgagctgcctcctacaagtataaaccttggcccaagggcccacaagggccacagccaattggcagggtcatggtaaatgatgcaaaggatggcatcactcttttcaggagaaatagcatggttggcgatgtatcattaactgaatgacattttgtatctctttcattcgtggtcactgatctgtgcaaaaccctccttcccttgctctaagcagagaagccccaaagaatctaaatcagccagggacaggtaagtaagcccagggtcttaaatcacccataagtttgtggccaggtttgcatttggtcctgaaggatgtattttcctttcatgggttgtgggccaatgtttcttttcctgctgatttatagcctcctataaattaacaggagcctttcaactgggaacgccacatcccaaaggcatgaatcttccgtaggtaattcctccctgaggaagaaagagttagctctcaattacatacagcgatgggggtgcatggtggctgaaatgatacaaatgccacttatattcaagttggagccttttcacaaagtcacagaaagacacagtgagatttgagtcccagaagcataaaagtcccagagaaaggggccttgacatagctttacttgcattgaatacagatttgttcaacccccatgagaggagaaatactgaaacaccggaaaacattgtctcctctcataacattttcagctcatggtgaagacggacacatccataactatactaccagctaacatttcccactcatttggaaattatttttaccaatattttagtgactcaagcattcagggtcataataaaaggggaaaatgtactaaatcacaatttttactgagtctgatattcaatttctttgattcatttcttctttatttaatcaaatattcaccaagtattactaggtaccagacatcatgccagggactagaaataatgtgaaaaaaaaggatgttttctgctctcacggggttcacagctgtggtggctgaggaactgtggtctctgctccccaccaattatacatcagctggacataagtaagtgtgcagtaaaacagaaatttaaattttgaggtagaaaatttacttatgaattctatcactcttaaatatatatattttgtattgagggaggagaaagtggattacagtttcaaagaggcataactaggagtcaggaagcctggcgtctattcccaaatccttttctcattagctggtgatttataaaagtcatttaaactcagtcccagttctgtcatatgtacaattgtgtaaggcttaccctggaagttataaattctatgtgtttttgatcggaatccttcactgtacaatttatttgttctcttatacattcaccacttattcattcattctgctaaataaacattcatttgtcccatgtgttaattttaatggctactataacaaattacacaaatttggtggcctaaaacatgagaaatgtatcctttcccaattattggagaccaagagtccaaaatcagtattactgggctgaaatcaagttgtcagtaggatgtgttactttagggtgctctaggggatagtgtgttccttgcccctttgattttttagtggctgtctttattttttggctggtggctgcattactccaatctctgcccctgtaatcacattgcttcctcttctgagtgtgaaatctccctttgcctccttcttataaggatatatgtgattacatttagggtctacctagataatccaggataaacttttcacctgaaaaattttaattaatcattcctgcaaaatctcatttttgcaacatgagataatgaatagccacagaatccaagcatgaggatgtcttgtgcagggacattattcagcctaccacttcctttatttatgtgtatgccactttctcctccctcaacatgaattatatatatatatatatatatatatatatatatatataatttaagaatgatataatttataagtaaattttctacctcaaaatttaattttctattttactccacattttgagaatgagtaaagtataccggttaataatacagactttggaatcaaaagagttttgtcctgagtactgtctctgccacttcttatctgtgatcttgggaaaagtacttgcattataataatatgtgtcacattaaattacatatgtaaattatttagtacagttagttcataatattaactaatcagtggatatcagaaaatatcaatattaggtatatatgtggtctagatttggaggaacttgtccacgcccctggcaaattcaagatatggttaagaaattgtgaaataaacagttccaatgaaattcagtaacttttttttttaagagatggaacctcgctctgtcactcaggctgaagtgtggtggattatcatatgtggcttactgcagcttcgaacttgcagactcaagcaatccttctgcctcagtctctggagtacctgggactacaggcatacacaaccacacctggctaatttttttttaatttttatttttgtagagacaggatcttgttattttgcctaggcaagtttcaaacacctggcctcaagcaaacctcccccacttggcatctcaaactgtgggaattatagatgtgagccaccatgcctagcctaagttcagtaacttctattagcaaggaaatgtcagggattttctttgttttctttctttttttaatttttattttattttttggagtggaggtttaaaaagcagaagaaagagaaagaaaaacagttctctattgagagagatgggatttctgagaggaaagacggctggtggcagatgcgccagatttacagtcaggtttgaggaggtggtgtctgatttacatagggctcacaggcttccctgaactataaaatttcctgcacattttatagaatgtgagggtagagagggtaggagatatgacggtcacggacaggaaaggaggaaattaggatagaaaagttgaagaccctgttgctgacacccatcgggtggtcaaaggctggggtcagtccagaagcctttggatagcaccagggggtagcctcagccagaaatcctcgtttgctacaggacctcttccagccccagatgatggctaagtactctgtgaaaggaagctggttcaaacatggccaatatgcccaggaacccatgggcaccgggggattctccatgttgtcctcagcaagcctgtcccccagatttgaagattctgtgggtagaaacagtggtaattggatgctgaatgtgaagaaaagagagaagttctagataatccctatcatttttcccaaatggtggagtgaaatgaggtcactcgttagacagagaacccaggcagaatggcaaaaattccataaagaataattatatttcctctttccttttaaagaaatccaaaagtcctcttccttctccccttccacatttcccttctcctttccttctcctcctctctctcctccttctctttcttcttttcttctgtgtagctggcagcattggtataagccaacaggaaaaagtgagacaaatctcagactcgacagaatgtgtcttttcctgtctcttccccaaacagctttctagatgccaagctctttcctacctggtggtcatcttgctgccaattgatctctttctgaaaggcttgtgtctaactacccccacccatgaacaccctctgcacacacaagacacagacatttaacctgctgatgtcctactcattatttaggctgtgtttaattgacatgttctaaggaaagtattcactatttttaagcattgactctccacctcactaccatgaaaatacacacacacacacacacacacacacacacacacacagtttatgctctgttatatactgctctgattttctgtatctttcactttttgcactatcacaactataataaaatatttgaattactatctatataatgcccttctctcccattagtccataagcaccaagagacaaaatccatgtctgctttcctcactgtggtatcttttgaacttatcacagaacctggaaaataccaagttataaacatattctgaatgaaataatacaaacgaatcaatgaatgaatgatggataaatgcagtgtactataataatgatgtaaggaaccacttctaagcacacagaaagcataagacaaatgttcaagacacacatgcacctgtaaaatgagtctctgatcaggatagctgctccaatcatgggacattagacacttggtcttcctgagaattactcattggtaagcactttacagtttatgagcttctctcacttgcattatctcacatgatccacccagcagtattgaattggaagaattatcagttccaattgcaaatgaaaaaaaaaagaaaaaggcccatggagacattgtaatgacccaaggtgtcacagagactgagtgggaagggttagcattttttttttttctttttgagatggagtctcgctctgttcacccaggctggagtgcagtggcaagatctcggctcaatgcaaggtgcgccttctgggttcacgccattctcctgcctcagcctcccgagtagttgggactccaggcgcccgccaccacgcctggctaatttttttgtatttttagtagggacagagtttcaccatgttagccaggagggtctcgatctcctgacctcatgatctgcccacctcagcctcccaaagtgctgggattacaggtgtgagccaccgcgcctggccagggttagcatttaaatccatgtttttaattctgaagacatttttctccataccttgatgtccttcagacagataggcatttactaagcaccgactctgctatgtgccagggatatgcagataaaattgattctctgtatggacgcaaatagataaatagacagaatgggtccatacctagtgtggaaggagttgcaaggagtgggcaacttagtcggttctaggactggctcgaagtctggaaccagaggacacagagccaggcaggggcagcacctcccttacagacagggctaatccctggcaagtcagggctgtggagtgcttggggaatgacctcagagacagacagggagggccctggtcttgcctgcttagctgccgacagtcccagatcctaaggtggcccagtaacagcagggggacagggggacctgccctcggtcctcaattttttcatggtccttgcctcccttccaagcccctctactatcctggcaccatttcttcctgggcacctaacgcagacctcatcctctgtcctctttagtttttattaaagagacagctgatgaggacttagagtgctacccctgcagaggaacagagaagggaggtgtgtggtgagaagaggtttggtcaatgtgtgatttttcttgcaatgcccctttatcaacctgaggtaagggcactttgggtactttggtttgggttgagaagataatttgggatatgttgggtgaatgatttgaaatgaagcagtcagaccatttaagaacacgggctttggaatcagagatctgagttcaaatatgagtttcactgcttcacttcctgattatgccacctcaggcaggttacttgacattgctgtgtctcacttttatcatttgcatctgcaaaataattgtcctaaaaaccaattcatagagttggctcaaggacacagctggtaccaagtgaatgatggtcatacatgtatgtgtgtgtgcatgtgtgtgtgtgtgtgtgtgagagagagagagacagagaaagggagggaggaagagagtgtgtgtttttgcatatgacttagcatttattgagtacttctttggtagaaactatgctaattgtcatgtgtatatgattatctgatacagattttattaaacccattttacagatgagaaaaatggaagctcagacaacttaagtaatttgactcaggtcaaatggctagaaagtgcagacccaggatttgagatttaaatcaggtttcttgatgccaaagcacctgcgtatgggtagtctttctaatacacagcaaagtggaagctgtctctcttgaccttgagccactccttgcggcaaagtttccagttaacatgaaacccaatcagattccccaaaatagcagcctgttcctctagggagaagaggagccccacccaaagcttgctccagagtcttggaggaaagaaaaaggagggagcagagagtcttgcttaaaaatgtgacacatattttccaggagctgcctccaggcctgggatggagattctgagcatcatgattttaaactttttacttaatttttcattcttgcttcaggactgggcaagctggactctcgagtcttgaacaaaaatggaaaaataagggctgcagttgaaatcatttcactgtgcctatttcacatgatgctgcctgcaaaaaatatagcaaacaagattcctctgttcagtttatctccagaaagagggaacctgcatggagaaactgtaaggagtgagagagaggtttcggagaaagatgagctttagctttgcaaaggtgggatttgttttgcacagtaaatttctggaattatttcatttgatttcccattgtttgagtgtactgggtggtacaccttgtgctaggcactggaggagctcttagaggatttaaagagtcataatctctaagtgatatgagtagtggggtttgttcaaagaagagaactagcaaagagcagggcataatgaactaactataggtcaattttctcctctttcaagtcctagtttaaacacagaatacaaaatatgtctttcaaaatgatcatctttcactaaaggaagctgattaaatgtacaggtgcagcctctagaccttcctcacatgcttttctctagctggaagcagagcaatgcaatttacatgggcactgtgatcaattcttaacatggggattgtgaagcactcaaagagacttgattggattaaagactgataaatctttcctttaagttttctgaaaatgataaaaagaaaacaaacaaacaaaaaaaagaaataaaatctactccatcttccgtgaacgtggaaatagctataaccctgaaccacagactttgatatattcctacttagcaccacgaaatcttgttatggacctgaaactgggtgcagattttcctagaagtgccacaatcctcaaaagaccattcagtggtcctttgattaaagtagaagaatttaaaattgtggcaagccatggaagaagagagataatgctataaaaaaccactggtctggagatggacgctatatcatgatatttgtaactgattgtgatttagcccacctagatggtcactgcatctctggggaaaagaaaggtggaggatgacatgaaaatagcgttcaccgaatgacaagccagaaggcttgtgtatacagagatagcatggaagccaaactgatcttccaaatacctaaaccagaaagaattgacagctgcatgcaggaatggaagggttaaatttgataaaagtgttctggaaaacaaacttgcaataaaaatgaatactgcctttaaagaacttccctccatctttgacttctgcactcctcactctgcacaatattgtttagtaaatactttgtcatgttaaaaagaattatgagcaagaaataagaacagaagtttatgcatagacactgaataagcaaagcaatgaaaagcaaacaaaagaacacacatcactggaggaagagttctagcaaatagttttccagttcctgacagcttcaagaacattaggtcaccctgatatctcttttgcataaaaaagggagctctgagctaaaaagcaagagttctagtttaaaaaaaaggaaaaaaaaaaaaaaaaaaagaaggtgagaagagctcaagaaataatcaaagaagaaattttaagtaatattgaagtggaagacacatgaaaattccagaagtagaatgaactcaactgaaaacatagtcaaggacaaagctgtgcttgagaacaatcacattagaaaatgttttatgagatgaaaataatttaacagaaagaaacatcatcatattacatgccaagaaatttttatatagaatcaacagcacagatcccagtaaatttaatacatttcagatgtgataataataatgtaataataataataaagtaatttagaaggaaaaaattcagagttgccttatactcctccacagcaacatgtaatagcagaagacagtggcataatatccataatgtttaaagggaagaaaactagacccattatacccagcatagcttgtctttagaagatgaagacaaaggatctacaacctcagacatacagatattcatcctatggcatgcataaatcttccttagaattaaaaaaacagacacaagacaaagaaatgcacccaatgaagaaatgaaaaaggaaaaataaaaacttagagaagtctaggaaaaagattgattggtagtgaacattaaatccatttaagtatataactaagattactagctctgagtattactattacctagtagaataaaatattataaaacttgacaataaaaataatactgtaaataagaaaacagggaaatcaagaattcaagagatactatgtgcatggtgcgatcttggctcactgcaacctctgcctcctgggttcaagcgattctcctgcctcagcctcctgggtagctgggattacaggtgtgtgccaccatgcctggctaattttttttttttttttttttgtatttttagtagagatggggtttcaccatgttggtcaggctggtctcgaactcctgacctcgtgatctgcccacctcagcctccaaaatgctgggattacaggcgtgagccaccatgcctggcctataatttttaaaaatatcttcaatctaattttttaaaataacattttctgccttgaactttagaggagattttcataagtgaaatctatttgtgtaaggaaacttaaataaatttttcagttactcctttagtttcatgttaggctctactttataatacattcaagacaagtgaaaataatcctttacattttaagtgggctgcattggacgactctgctttcattgaggggatatgtataggtaatgattagtttaaagaagacatatctgtgattttttttcttaatcaaatttgtatctgttttaagaagtgcacatgatggaatcaagtgggcaatctctcagaagccataggagatgtgttaataaaatagtagaatagggatcaaatagaattagattgaaattaaaatctatgaaggtgaagaagaaaaaagaataatgaataaaagatgaggaaatgaggaaagatgtactgtgccttaggactactgaataccataataagccatgctcagtagtaaaagagaatgtcataggaagtgtgtattacaactgtgagccctacacagctcaacacttatacttggtaggcttcttataacatctgatactaatacgccctttgcattaaaaataaaagttttttgtacaattaaccttctcaaatgtcatcaacaagtcatcaggactgatgtttaaccaaatctgcttctaccttttgaaattaagatcagctatattattctctcaagagttttatcattagactctggacttggatgtctatcccactcatggttatagactctgtgaagaatatatattgtgtaatttttgcatgtttatttactatccttcagaatctggcatagtacttggcatgtagtagtgcttaataagtgtttgtgaattgagttaacaagtatttgtgaatgatatgtgtatgaagattaagccctcttcccaaggtgcacctaggaaggggaacatcacacaccagggcctgtcatggggtgggggagcaggggagggataacattaggagatatacctaatgtaaatgatgagttaatgggtgcagcacaccaacatggcacatgtatacatatataacaaacctgcgcattgtgcacatgtaccctagaacttaaagtataataaaaaaaggaaaaaaaaataaaaaaatatatagtgccaactactgttatattctagagtgacccatgcagaatatgcagaggatgagcttaaagattatgtgaccaatagcccaatattcacctggaggatataaaatgaatgaaaagaagatttcactcacttcagtgagtgagtgaagctttaaggagactggaaactgtaggcagtggctgacgctggcttcctctctgttaaagcctaataagaaaaactgtgcctggtatttgctctggtaatagatgatgagggagagttctactgaaaaatacctgctcttccagagtgcattggagcataggatatatacttctaatgggtcagatggtggtcacttggaaagagctgcccaggagtcatccaaaagaggttgtaatttttcccaagagagatttctggatgggtgatgagaccccagtagaaagtatcaatgaggtcaccagaggccaaagggaaattgtagggagtccaccacaggatactggaagtgggacaccctgaggtgatggaggaatgtccatgaaggacttataaacacatcttcaaaaagcttcagatttgaacatccatggaacccagactcagattttagatcccattatgcccaatggaaaccaatactagatgattatattagcattgaaaaaggaacactgtgatggttaataatgagtgtcaacttgattgaattgaaggatgcaaagtattgttcctaagtgtgtctgtgagggtgttgccaaaggagattaatatttgagtcagtggactgggagaggcagacccaccctcaatctgagtggccatcatctaatcagctgcctgcgaggatagaataaagcaggcagaagaacgtggaaggatttgacttgctaagtcttccagctttcatctttctcctgtgctggatgcttcctgcccttgaacgttggcctcgatgttcttcagcttttggactcttagagttacaccagtggtttgccaggggctcttgggcctttggccacacattgaagggtgctctgttggctttcatactttgaggttttgggacttggactggcttcctttcccctcagcttgcagatggccctattgtgggacctcaccttgtgattgtgtgagtaaatactccttaataaactccccttcatatatactatctatcctattacttctgtacttctagagaaccctgactaatacagagacctttcctgccctttatttcccctcagtgttccagtgaaatcctgaggagccagaggcagcttcctgaatgggtgaagggataacagccctcacaaggaaaaagagagaaaggcagccatgtccctgtgtttctcccatttttaaaaccatcagatctcatgagactcactcactatcatgagaacagcacagaaaagacccgcccccatggtttaatcatctttcactgggtccctcccacaacacatgagaattatgtgagctacaagatgagatttgggtggggacatacagccaaaccatatcattctcccctgacacctcccaaatatcatgtcttcagatttcaaaaccaattatgccttcccaacagtccctcaaagtcttaactcatttcagcattaactcaaaagtccacagtccaaagtcttatctacgacaaggcaagtctctttggcctatgagcccgtaaaatcaaaagcaagttagttacttcctagatgcaatgggggtacaggcattgggtaaatacagccattccaaatggggaaaattggccaaaacaaagaggctactggccccatgcaagtttgaaaaccagcagggcaatcaaatcttaaagctcccaaatgatctcttttagctccatgtctcacatccaggtcacactgatgcaacaggtaggctcccatggtcttgggcagctctgcccctgtggcttttcagggtacagcctccctcccagctgctttcatgggctggtgttgagtgtctgtggcttttccaggcaaacggtgcaagctgtcagtggatctgccattctggggtctggaggatggtgaccttctcctcaaggctccactaggtggtgccccagtagggactctgtgtgggggctccaaccccacacttcccttccgcactgccctagcagaggttctccatgagctccctgcttctgcagcaaacttctgcctggacatccaggcatttccatacatcctgaaatttagatggaggttcccaaacctcagttcttcacttctgtgcactgacaggctcagcaccacttggaagctgccaaggcttgaggcttacacactctgaagccatagcccaagctctacattggcccctttcagctgtggctggggtggctgggatgcagggcaccaagtcccaaggttgcacacagcactgggaccctgggtccagcccatgagaccatgtttttctcctaggcttccgggtctgtgatgggatgggctgccatgaagacctctgacatgccctggatgcattttacccatggtcttggggattaacattcagctcctcattacttatgcaaatttctgcagctggcttgaatttctccttagaaaaatgggattttcttttctatcgcattgtctggctgcaaaatttccaaacttttatgctctgtttcccttataaaactgaatgcctttaacagcacccaagtgacctcttgcatgcttttctgcttagagatttcttctgccagatactctaaatcatctctctcaagttcaaagttctacaaatctctagggtaggggcaaaatgccaccagtctctttgctaaaacatagcaagattcacctttgctccggttcccaacaagttccttatttccatctgagaccacctcagtgtggcccttattgttcacatcactatcagcatttttgtcaaagccattgaacaagtttctaggaggttccaacctttcccatatttccctgtcttcttctgagccttccaaactgttccaacctctgcctgttacctatttccaaagtcgcttccgcatttcaggtctcttttcagcagtgctccactctactggtaccaatttagtgtattagtccatttttgtgctgctgataaagacatacccaagactgggcaatttacataagaaagaggtttaactggacttacagtttcatgtggctggggaagtctctgaatcatggcagaaggcaagaaggagcaagtcccatcttatgtggatggcagcaagcaaaagataacttgcgcagggaaactcccatttttaaaaccatcagatctcctgagacccactcactatcatgagaacagcatgggaaagatccaacctcatgatttactcatcttccattgggtccctcccacaacacgtgggaattatgggagctacaagatgagatttgggtggggacacagagccaaaccatatcatcatctttaaggagacattattaagtttatgataaaggctctgataaaatgcccatgcttggagatgaagtagccttaaaaaattgattgcaacttaattcgctcactagcacaagagtgtcctttgtaaaactgagcagaaatcagctcctagaaataatgaatgtttatcaattaattggattgatgatttcttatcagacctttctctggttggattatttactctagacactccactgtttgttaatgtattgctaagattgctatgatcatattaaatcccaagtttattcctcaagggattttatatctgttttgtttgtctaagaactgtgacctcacttgagtcatttaaacaattcatatttctgcctttcctttaataatctttctcttagtcatccctgataaatttgggcttgtttgcttttcaacattctgcttttgatgcatcccatgacactcaagcagagcagttttctagaaatttagaacagagggctagacttcatgggcaatgttagtaatacagcaattttctgtatgttattaatttagagatagatatattttaagatagtaagtgaatagagaaggaaaaaggagcacggaaggaagactaaacttgaaaaagaggaatgaagcagctaaacagatgatcaataataatgattccagttaatggcaagtttcattaattaagtaattactaggttccaggccctgcaaattgttttatccacattatattatgtaattctcaatacaacagtaaggtatattcttttcctcatgttaccaaggaaactgaggcttggagatgttaaatcacttgctacaggtcatacagcttttaaatcacaaagaaaattaatcgcaaagaaacttagtttcttttcaacttcgcagtctattacatctttaaccactgtgctctgttgcctcttaagtatgagaataaaccagtagttcttcacttggagtgattttacccccagaagatatttggcaatgtctggagacattttggttgtcacagcttctgggtgggaggaaaaaggggtgctactggcgtctactgggtaaaggccaaggatgctgtgaaacatcctacaatgcacaagacagcccctacaacaaagacatacttggctcaaaatatcaataatgctgagatcaagaatggaatgaagttactgatctttttaaaaattatatttttatctcattaatattaacactagtatgtctagagggactgaaattatacaaggaaatgagtttgctgtgcagaaagaagaggaaaaggaatatactttggagtgggacttagagccttgggaggaatttgctgaccacaaacacgtcattgttaatagtaagttctgagttaccactgcatgccagccatcctttgcatgggtggtttggggcctacatagaaagaattggcctttgaatcaatactcaatgattgtaacagatttgcctgtctcctgtgtttttgctattctttctttatgaaaaaaattagtgtccattttaaaaggaggatctgttacctgctatatttagcgtcatgaaggaggagaactgcaatatttgctttccataaatttgcaaaaagaaagatattttccacccacccccacccatgcaatggttttccactgacagctgtatatatgggtatcctgccatatatctctggagtgaagaagacctgggaggcgtgggcaggccaatgaatggagccattgactcagatgttcctcgatgggcaggcgtgattatttcagggggccagttcttccactgtgaccgcatagctgagggcacagccaatgaatgagcttcacccaataatttctggttgattcacatttgggtcagtgatgtggtgggcaatgccagctgcagccccaggctccaagggcaactttccaagctgggactccttacaattctgccctgttaatggaggttgggggaaaatctagggtgggtccctccaggcatgagtgagtgaggcgagggaaaagaaggaaatggttttcataaattattgctagagtttttagagaaataaaagcatgggtttgagaaggaggtggaggactctcagcatcatgccactcctattgctcttcggataaagttcaaattgcctcatgtggcctactaggcctgtcatgagcaggttgccatgttatctttctctctagcctccccttaggctgccgttatcttcaatatctaccctccagtcaggctgaccacgttttagtatctctaacacggcattgttctctcctcaaagtctttgcaaatgctattactttatcctggaagggcttactcttcaacccccaacctgattaaatccttctcatcattaggatatagttgggatgtaactttcttgacctcccagactagatcagattgtggttacatgtttccatagtaacttgatcttcattgcagttatttcaatagctgtgttttccatctgtcttcctcatgagtctgtgagctataggagggccagaaaatatctaccttagtttatcttccatacctagtacctagtccagcgcctggcccgtagcaggttttactgaatatagtacttaataaaaaataataagggggagaaagaaggagagaagaaaagaagggagggaaggaaggaggacaggagcaaggaaggatacatggaagaaaggaagaggggaaagaagtagaagaaagaaagaagaaaggggataatttaatttgtaaaacaaaaacaatttccaatcatcagtttcaacctctggacttatctgtaaggtgatggcagaattgaagtctaaaatctaagtctcctgaatctcagttcaatagaacaaacaaataagtacaatagatccagatataattcagagagaggtcaattatccttgcaacttggaggaagtatacgagtttgctgtttctcagtgaaagccaattccctgtcgtggcctattgagcagccacatgttctatctgttgctattatttggagtatgattagaggcaccaggaaaataattagaaacatcaagagaaagattaggtgcatcagaagaatgagtaggggcattagcattgatcaagcaggaactctatgccaaggactatgcagggcacatgaaacacattttctcatggcatcctcacaaaccacacactgaggtgaggattgttccccgcagtgaggctaatgagaaaatcaagactcagagagtttcagggtatatgaggagaaagaataataccctggagacctggatgctttggtcacttattccctttccccaccccaggcctacctgatgacttttacttacacttcacatttgattcaaatgtcactttttcaggaggcattttctttttttcttttttttaattttactttatgttctggggtacatgtgcagaacgtgcagttttgttacataggtgtacatgtgccatggtggtttgctgcacccatcaacccatcacctgcattaagtatttctcctaatgctatccctcccctagctccccaccccccaacaggccccggtgtgtgttgttcccctccctgtgtccatgtattctcattgttcaactcccacttatgagtgagaacatgcagtgtttggttttctgttcttgtgatagtttgctgagaatgatggtttccagcttggaggggatttcttaccaccctcactaggtcaactcctctcttacagacctccatttcctctttgtacttgtcacttctaatcatgcatttttgagtgattagttgactagtatctgaatgcaaggcacatgtctgcattggtttgccgttgttttcccagctcctgaatagccctggcacataacaggttgccaataaccacttatgagcaaatgagttagatcattttgttgagcacatattctgtcctgggccctgtgctgattgatcttgctgtgtacagtggaaagtcatacatggtcactgctttcaaggagctcatagtcccatggggagattgtcttatttttttatgatattactatgttattttttaaagatactactttaaaaaataagagagttaaaatgttattggtaatagggggcccagggaagtccctgggtggagagaaggcagagatagttcattttacctaggaatgggtttctagaggagagggagcttggtgggagcccaggaaagtgaaaaggtgtttttcaggtggacaagggtgatatgtagttaggcagaaggaaatacagatgaagggagaaatatgagcagagggaaaagaaaaggagatgtgaaacaacatccatagcaaatggtttggtttacctggagcacctgctttgttcagaggcatgtccaagattgcagttgaagaggtgtctgtgggttagatcaggaagtggttttcatgcttgccttgggaaattgaactcttaatagtaaccacatgttgatggctaaacacagttaaaaggatattgaaccattcatccattatttgagtaaacatttattgggtacttacgtgctagcacgctgaaaaatgtgggtagaaataatacaaattccctcctccaagaagcctgcagtctatcaaatatgtaacagcagtcaggccctgacttctacgttaacttgtaagacacaaaaacaaaaatgaagcaaactgaaagcaatcggtcatcttctactcagcatacccagagtgggctgatagtgacagagtaggcaatgatgagggatgtgaggaaaggaggaattactgtgaagggaggatacataactccaggagctcttcctggagaaagtggctcagaggataaattctgcaatgcaaagagaagaatatgttttcaatgcacacatttttatgttcttaaatatctgttgcatttcccccccacgactcaggtctaaaaaagcttcccatctctgacattaagtgaccactccaactttatagtcctcccacatcctccacctaactaacctttcttgaacacctacattttgccaggcacttttataagcatttagttatagtattccatttacccactaacttgtaagatctgtttcataaacaccatcttgcagatgagacaactgaaaccagaaagtgttaggttgctgcaaaagtaattgtggttttgcattattggaatttgccatttgatattgaaatacattcttaaataaatgtggttatgttatacatcattttaatgggcatttcttgcttttattttttgctaatgacattacttgctgtttattttatgtttattttagactgtagaaatgatgttagacaaaaagcaaattcgagcaatttttttatacaagtttaaaatggtcataaagcagcacagacggttcacaacatcaacagcacatttggcccaggaactgctaacaaacgtacagtgcaatgatggttcaagaagttttgcaaaggagacaagagctttgatgatgaggagcatagtggctggccattggaagttggcaatggccagttgagagcaatcattgaagctgatcctcttacaactacatgagaatttgccaaagaactcaatattgaccattctacagtcactcagcatttgaagtaaattggaaaggttaaaaaacttgctaagtgggccgggcgtggtggctcacgcctgtaatcccagcacgttgggaggccgaggcgggcggatcacgaggtcaggagatcgagaccattctggctaacaggatgaaaccccatctctactaaaaatacaaaaaattagccgggcgcggtggtgggcgcctgtagtcccagctacttgggaggctgaggcaggagaatggcgtgaacccgggaggcggagcttgcagtgagccgagatcgcgccaccgcactccagcctgggcgacagagcgagactccggctcaaaaacaaacaaacaaacaaacaaacaaacaaaaaaaaaacaaaaattgctaagtgggtgcctcatgagctgagtgaaaattaaaaaatagtcatttttgaagtgccgtcttctcttattctacgcaacaaaccatttctcaattagattgtgacatgtgatgaaacgtggattttataccacaaccagtgaagactagctcagtggtttgactgagaagaagctccaaagcacttctcaaagccaaacttgcaccaaaaaaaaaatcatggtcaccagttggtggccggctgccagtctgatccactacagctttcttaatctgggtgaaagtattacatctgagaagtatgctcagcaaatcgatgagatgcaccaaaaactgcaacacctgcagccggcattggtcaacagaaagggtccaattctctacaacacctgactgcatgtcgaataaccagtacttcaaaatttgaacaaattggcccatgaagattcgcctcatccaccatattcacctgacctctcaccaaccgattaccacttcttcaagcagctcaacaacttttgcagggaaaacgcttccacaaccagcaagatgcagaaaaatgctttccaagagtttattgaatcccaaagcatagatttctactctacaggaataagcaaacttattcctcattggcaaaaatatgtctattgtaatggttcctattttgattaataaagatgtgtttgaccctagctataatgatttaaaattcgtggtccaaaaccacagttctttttgtaccaaccaatacagcaaaaatgtgttttcataaatgttctacaacaaaatctaagaactttccagtatattgtatggtataacacactttctagttcagatgtctgcaaactaaaaaaaaatgtgatgatcaaaaccattgaatgctagcaaagggattacccaatacttgtcatctcacagctattcattattgccaggaagttctcagacttcatgcaaaccttaccccctcatctttcacattaggaaactgaggcccagggaaattcagcactggctcagtgtgatggagagtgtttgtagccaggccagaagtgagatccaggtttatagttcctcttcttatgatcttctcactaacgtttatagttctaatgctagattctgattcttctcattttatgttctccttgcagtttgtaaggtgtgttgggaagggtataggttttgaagccatttggatctcggtccaggttagagatctaccactgatttactctgtggccaagaacgagcttcctcctgggtttcaatgtcctgtcaaatggggtaaaacaatctctctctagtaggtttgtgataagtgttaaaaaaagtcacgtatagagtaactaggacagagttcaacatataatccgacctaatacatgttcgtttttcaacttcccttgctaggagatggaaggaaggtgaaatctgccacgatcgctactttcaaagaatgtgaactctctttgctccctgcaccccaacaaagatttctctcttatcactgtgactgtgttatcagagggggataacatagtggttggaaacacttcctcagactggagagactggctaggatttgaagaatgcctccctagggtctctatgtcagtaacactttatgttcaccagtggagcacaccagttactttctggatagataaaacaattccattacttacctgtgcacaaaatgatttccgtctttgtcagggctgaggtgctagttttatgacataagggaggactctgattcgagactgctctttagtctcttatttcaaagatagtttttttctgagaaatggcaggattggagtgcgccttttcatggaagttcttttctctgaaataatggaaatttgtaagtccctataggaatggagtggctgaacttccagatctgaatttcactgaagatgtttctgacagacgtgtcccttcaatggtaatcttgccttcactagagatttgagaaaagaatgaagcatgttttgcattttgaaaatagaaaccatggcaccccatctctctctctctctctctctctctctctctctctctctctccctctgtgtgtgtgtgtgtgtgtgtgtcttttaccttgcctgcatctcctttttttattttttaaaaataaatatttttgttttattttgttttataaataaaagttttatttataaaaagtttactttataaaactttttataagttttatttataaaaataaaatgttataatttctatgtgtgcaaaaaaatgtatgcacctgtattctttatttccagtggaaaatggcaagattcagacagtttcccagatgtctccaaacctacttgttctagaatcatgtaacacaatatatatagacacaagtaatatctattttttttcttttcatgtacttctaacagtccacttttaagtgctcccatgaggcttttcttgatttgctttatttttcttttaaataaaatcttaagctgcccactccagtgatgaggtactacctagtcctagtaagagattgcagtgggatcgaatgggacaaaaacaaagaccatgaagcagtaagtacttcctaattattcaaagaaggcatgtggagcacttgccatgtggcagacacagtgctgggagctgaaattagaacagggggaaaaaagaaaagacatactacttgcccatacagtgctagcttcttagaaatttttggctgaatttatgaatgagagtattttttcatttataaaatgtaaataaaagcaaccatgtactagggcagttgtgagagttaaattacatgtatgcatgaatatgagtaaatatggcaaactggttaggaggtcaggctctgaagtcagaatgcctgagtttgaatcccagatctaagcactgaactctttttgcctcaagtttctcttcagtgaagtgagtgatatggtttggctttgtgtcctcacccaaatctcatctctaattgtaatctccatgtgttgagggagggacctgtaatcctcatgtgttgagggagggaggtgattggatcatgggggcagtttcccccatgctgttcttatgatagtgagtgagttctcgtgagatctggtggttttataagtgtttgacatttcctcctacacacattatctctttcacctgccaccatgtaagatgtgcctgcttctccgtctgtcatggttgtaagtttcctgagacctccccatgtggaactgtgactcaattaaacctctttcctttataaattacccagtctctagtagtacctttatagcggtgtgagaacgaactaatacagtgaggaaaatgctattagttgctgtaaggaaaaaatgagataatttatgaaaagcacttagtgctaagcacagagtaaatgctcaataatggtagttcttgggtacatagtagatgctcagttagattttgttactaattcactgaagccagaagacagaattttgcaatgtaagtagaactgaacgtgtttttatatgtgtagcttttctaagataattatgtttgagaggtgttgtttccagtagaactctttaaatattattacacagctcttgggaacttgggaaaattttactcattattccaatacatctccctgaagactgatttccaccccccacaagtttccatgttcttcatgggtctggaatttagtcagagagacaggctacttttctctaacccaagccttctccttgggtgattaagcacgtagtttcatgggaagtttaagaccaaagaattatggcattgtcatgtcaggcactcaagtgtcagggatttggcttaagtgaattgattactggaaacccttgaaacttgttatctttaagttgcttccagcccctgtgaccagaaatgcatggcgactcccaataacatctgcctttcttacaatcccgcccataccagttcaaagatcacatagctgattcttttattaataaaatatttattgagctcacacagcaccctaagcactctgctaagtgctcaagatttagacaggaataaagtattatctctgctatcatgactgttatcttgcagtgaagggttagataaggagacaggaaatgtcaatagattataacaaatgggacagtggcacagggacatgtctgggacacataagcaaggttcctgcctcctctttggggccagattacatttagtgatgactgtgagaaaaatgtgtcagctgaactgaggtctgaaggcagggtaaatgtaagccaggcaaagtggacatgggatattaggatatatttctgccgaagtaacaacatataaagacctaggaattagcaaaagcgtagcacatacaggaaactgtaaagaatgcacaaagtcttgtatacaaagttggacatagtgagagttgagggtggaaaagcaaaccaaaggcaaatcttgtccaaggaatttgaactagctgagtgcttggaacattggtacatctttgttgaaagactaaatggatcaataaactgtattctgagggaaatgaagagccattaattcatttaaattagcatctgacttgtgttatatgatcatagaatctaggttaaataattcacctggtgcctcatatgagagcttgacataggaggaacaatcttcctctgtgttgcaatcaccatagcatgaacaaaatgggaatatgggggaaacaggagaaggagacaaatagaagagcagtcatcccagggaacagactaaatacggaaggcctatgcccagcccaaagaaatgcagagatggacaagtcatctcgcatggataagcaagcattcatcccagggaacagactaaataaggaaggcctatgcccagcccaaagaaatgcagagatggacaagtcatctcgcatggataggcaatagaatggaatgtgtgtatttaagccccagagacaatggcgttccaaccttgcctttgtccctaccacctatggactttcatctttttgagactaagtttctttatagggaagatgtgatttttaacatccctgcgtggagttgttgtgaatatataatagctttatgtataatgcatttatatataaaattctcagcacagggctatatacttcttctgggatactcagaaaagatcatttaagataagaagccatcctaaatttggatgttttctaatataccactgagaataactatatttattgaatgcttatattgtgttatgtgctgttctaagatttatagtgaccgtggatttaatcctgccaaagaccctataagatagtgaattctgttattctcactttacaaagaagaaaacagaagcctggtggaaatatgtatgaatttgcatgaagatgtatggccagaggtggtggagttgggactcaaacccaggctgtctgggattgaaatgctttcctatattgctgaaaaaaaaaaaaatggctgtacagtaaataaaatatcacagtgtcatgtatgaagtcagtggttctggcaaccctgatctaatgctgcagtggtcataaactgaactcagggaagttggaagttgagttttgaaacaactttaaatcatcttatttagccccttaatactcacatcagaaataatcttattttgtgtacattgttagacaattaccaataacctaactacggttttgtctaagacactgatttgacttagttgtctggaagatttagttgtctggaaatacattgtgatattgcataaacttttaaaaaatctagttaagtatcgccttttacacacaaagaaaaacagttttgtttaaggtgaagagacttgctgaaatgtttgtaatcagtccatgaaactgatttcctaacaaagatatttggtgccatggagtttgaaaaacagggaagaattttcaggtatgatgcagtcttcatcactgaactcattgtactgtttagttatatgtaacagaaagaagtcaaacttgcttagaaaatgaaggggaatttatttatggttgtatccaaaatttcagaggtaggaggaactttatgtacagctcacatcagtgactcaagattattaccaaaagactattttgtctttttcttctttgttttctatccttttgttatcatattagaatataaggtggctatactagccagatactccaggtcaacatgcttattcacaggcagtgatcgaaagaacatcgctggggatcagtcaaaactgcctgaaatgggtatccaagaatggtagcaggtcatttctcctaaggaaatttgtggaactattatccttaagaaagggaaatggaggtaaacagtaaaccaaggtgtacactgaaatctctttctaggagaaaagagtccacattcaaaagtcccaagcattgtctgagcaatgttatgtgacttcaataaacatttgcaactttgtatttattggattcatcggtggtcacttagcatgactgaatgacctgtccataaatatctgaaggtcattctcagatcttagaggaatattaaagtgtgaatgttttatttctaagattgggaaactgatgctccaggagagaaagtaacttgtctaaattctccagacctgtaaacacaaagccggcatgagaacccactctttcttactgtctctctgaagtacatagagataaacaaaagaaatttcaactaatcatgacaagtaccaaattattcaagagattacccaaacaacttagctaattctgatggttttaaacactaaatcacaaatgaggcaagacaggagaatgtcagaggtgcacacataacatgttaggcatgcatgggagcagtagcatgtttgcgttattatttgtttacatggcttagtatctaagggacatgaagtattgtcatttatcagagactaggtctcaagtttgactctggtttaagttttccataatctgctcagtacatttcttcatttaggcagctctttcacaacggtaaaagcatcaggtgacaacttccatctggctggtcccaagttacttttcatgtaattcatccttttaataagctatctcctgacatattgggtccatcttgacaagccatgtttttttttgtgagacatcattctaattatcttaatatcttagaaggaagaactccataattatcttttatgggaaggctcgagacacacatttgaaattgtatgcccaggactttatgtgcagaagaatcaaggtatagtattatccagtgtctctggcaagtttttgggactaaatttcaggctacaagatgtttgttgttcattgcaaaggtcaggtttgactgcgtttattaaattacaaacttgcttgtcttgtatcatcggaagatggtatgaattaaggctttctcattccagtcacagtacagattgcagctgaaaaacatctaaagggattcaagtgaccaagaacattgaacagaaaaaccataacaaacagtccctgcctttggggagtccctatgctatttgatacaacagaaaatgtaccatatgttaaaatttaagacagaccaaatatcaatcccttcctccaaataaatcaagctgtcagtagataagacctcctgcctctaaacttgactcctccagttcccaccgcaatgatcccgatctcttactacttttgcaatcaaacaacttcaatagattttcattgctttaatgatcaagttcaaatgccttaaaacagtggtccccaacctttttggcaccagggaccatgtttgtggaaaacaatttttccatggactgaggggggcaggatggtttcagaatgattcaagtgcattacacttctcatgtactttatttctattattattacattgttcattaatatataattaatatataatgaaataattatacaactctccaccatgtagaatcagtgggagccttgagcttgttttcctgcaactaggtggtcccatgtggaggtgatgggagacagtgacagattctcatacagagcacgctacctagatccctcacatacacagtccacaatagcgttcgtacttctatgagaatctaatgctcaggctgtaatgcagcaagggggagtggctgtaaatacagatgaagcttcactctcttgcccactgctcacctcctgttttatggcccagttccacatggaccactatcagtctgtgggccaggggtgggggatccttcaaagatacacagtgcctcccctaccctcatctcttaatgttctttaaggcccctttttaccatcatacaaaaaatgacttaattttctgttacatgctaaacttattcacatagctaaacttttgaaaatactatttcttcagtctggaatgttctactctagtagtccaagtaataaaatcaccctttatgatgtagcttaattattgaaatctttgagaagggtgaattttatggcatatgaaatatatcttaataacgatgctattaaaaacaacaaaacattgatgactcttttataagaaacttccctctcttaactcattctaccatacagtcaggtacctgaaagcagatattaacacgtatacatgtacatgcacacgatactaggttagggaccaatttttttctcccttaaaaccctgcatacctacctattaactgtgtttataggtttacttgtttattttccatctagacttggagcctttaatgtggtagccattaatagcacgtggctgttgagctcttgaaagatggctagtccaaaatgagatatgctggaaatgtaaaattcacacacaacatttcaaagtcttgttatgaaacaatgtagactgtctcattagtagttttatagtgattacctattgaaattaatatatacattgggctaagtgaaaatgttattaaaattaatttcattttttctctttattttttaaaatgtgtctacatgaaaatttaaatttatgtatagggctcattttatttcatttggacaacactgatttagaccgtgagatacttaaaggtagggacagtgttttattcatctctgcatatagagtcaggcctgtggtaggtgctcaaggacttctctgcatgagataagtgactgaatattaagtcccaaatgaacagtgcagacactgagaacaatgggactacaagggagaggaaatgaacactatttccatacaagtccaggaaaatctgtacaagggatgcagaaggcctcgaagctggaaacgaaggccttgaagctaaattcttgagtagctaaagaagagattgtgccgtgccaggtgcggtggctcacctctgtaatcccagcactttgggaggcaaaggtgggcagatcatgaggtcaggagttggagaccagcctgaccaacatggtgaatccccgtctctactaaaaatacaaaaattagctgggtgtggtggcatgcgcctatagtcccagctaatctagaggctgaggcaggagaatcacttggacccgggaggcagaggttgcagtgagccgagatcgtgccactgcactctagcctggcaacagagcgagacttcgtctcaaaaaaaaataaaaaaaaaaagaagagattgtatgatttctccaagtcactgtcggcattcacgtttctcctatgaaaataaaaggccagcataaaatgggctttgatatgacttcataaagctgatctcatcatgaccactccaatgggaatatttattttacccttgatttggggttgctgattagcttccaaagtatgtagagggtcctgccatgcctggggtttctcttaagatattttatatacatgtggttggttcagtcgaggagaggcacaaagttaatctaaggccttctctgttcaaaactgtcaggtccacagtttttattcatggaagcttctgtaggctattctataggttggtgcaaaagtaactgcagcttttgtcagtaaaagtaatgccaaaaaactgcaatttctttcgcaccaacctaatatgtacatctgaatgggctgtaagcagacatctgcccctggcaacaaccaactgatgatttttttttttttttttttttgagacggagtctcgctctgtcacccaggctggagtgcagtggtgctatctccgctcactgcaagctccgcctcccaggttcacgccattctcctgcctcagcctcccgagtagctggaactgcaggcacctgccactgtacccggctaatttttttttttttttgtatttttagtagagacgaggtttcacggtgttagccaggatggtctcgatctcttgacctcgtgatcttcccgcctcgacctcccaaagtgctgggattacaggcgtgagccaccgtgcctggctgatgatattttataattaaattaatccattcagacagactttctgatattcagattttaaaatgcaaaagaggatagggcagttatttgcaagataaatctctctcaatagtaagtatagttttgtataatattgtataaaaacaatgctaataacaaaatgtattgaaaattcactatattggacattgaatgttatttacattacctcattcaaactccacaagaataaagtttggattgccattctacatttacagttgagttaagtggctcagaaagtggaaacaactgggccaaagtggaggaggaattagaactcaagtctgttttgctcatttttgctaccatgtgaagctatctttagggtgtcagccataagttttgatcaggttgtcctgccactgacttgataaatcagcccctcaggaaataatctacatgcagaacttccaactgattggagaaaacagaagctcagaaccctgcatttctgtcgcataccattcttagtgtagaattggaactttcaatactggaaccctgctctgagactctgcaggcctaatcatcaacgcctcctctaggtgccagccatagaaggaccacgttgggtctggcccttatttcagggaaaaggagactttctgcccagtctccaggctgctgaatcagcctctttcttcctttggctttcagaatttactttcaaccctttatttttcagtttgatggcctcacacagactgacttttgtgaattgacagagataaaagaaaataaaaacctggttatgaaccactgagtctataaactggatactttcctagatgtgtggaaaatataacagtgctagttttttttttttgttgttcctcttggactgtgagtacaaggctccttctttgagaatgagcaggaatgcctataaggagttttctttttattttccctgactccactttttgtttctggattatgatttatatcagaaaacatttcctatggtttggagatatttttagaagtctgagggtggtctcaggaaaaatggaaaatactctgttatttgtttctttatcttccaacttctctctttaggttccaatccggaccttgccctcagtcttactcctttcactgtccgagccaatcttttgtcccttgtttatttctgtagggaaacacccaatgcaggaggtgatagctctggaatttgtcattgataagccacctccttccagaaatcacaaattcattctgactgaacccttttttgctttaaatcagaggagcggtaatttctagtttgaaagtaacagacacatgtggatggtatccttgggaagaggaggaagagcagcactacagtgttattttacagacagcgtcctacctcatctatgggcacagaaaggcaagggagatccttattttatacctctatgagaaggtagtcttttagcattgcagagatcctgaaccgatagtttaggtgatatgaaacgtcaatcatacagcacccctgatgaaaaaccactgggcctagaaactttgaatacttatggtgctgaataactcattactttggaaagtttgctgttattatcttgtgcttcttatcatcaaatacgttctcagggcccattgagtgctaggaagatcttgaatcatttggagaaaatgcagcactgtgtattggtctccagacaggttatattcctggctgaggtcacaacgtctggtgcaaaactgaataatgcgagggtgatatgggattcgtaagcatttttacactcctgctaggacaagagagggttttggagatacagattcaaagacaattatacgtgaaacagcaaagtctgatagttgaggacatggcctcaggattcagagttcactacttattatctacataaagttgaccagcttacttaatctccatgagccttggtttctccatttgtaacatggggctcacagaagtatttgcttcataggggtgttgagaaaatgaaatcacttaatacatgcaaaatattgagaatactgcctggcatatagtaaaaaagagctcagtaaacttaagccattattgttatgaccctgactcaagcatgtgttgagaaatcctgaatcaagtgtagtatcatcatagaggaatggaacacttgtttgttaaatctttgcacttgcaagatttttagtggacactaagttctttacttttacagtctcatttgctcttttctaaaatcctgttgtctgggcacatcttaatgtttcccatattacagatgggagacttgcagctcaaagaggtcagacattttttcccaaggcctcagcttaaatgtcacaccttcagagatagatgccttctcaaagcactcaatataaaacagtcacccactcccgttttacatttactctaagattatcatctgcatgttattcactattagctggcatttttgtcatattcctgtgtgcgactgtgcttattttatgccttttcccagctagaacacaagctttctgaggataggaacctttcttgtcttggcacagaaccaatctccagcatttaatatgttgcaaatctttggtaaacatttgctgaaggagtaaatgaaggacactagaaggagaacagaatagaacaattattctgtaagaaaaacagaaggagctgtctttgctttccaatgctatccccaacttcatgaccttgggcaactgatttcctgtctctaaattagggaaatgagaatagtaacctctacttccttacagctatgatgaggaaaaataaaataaaatttaaaaatcacttagcatagtgcctgcgcataccaagggcaaaataaatgctggcttttgtcattggaggaggcaggatttgtgaggtttgtttgagagtctttcctgctatgttctatgcttatataggaaattatgaataataactttgatgagaacagaaaagttcaataaaaccatcatctctttgttccatttggttacttcaaatttgacaattatcttttaatggagaactgaactaaatgttctcattattttctttccagactaaatgctccttcttaaactaagtctcccaatcccacctcatatgtaactattttatttcttcccacaagctcaaggaatgtaaaaaaaaaaaaacgaatcttaagatgttaagcttagtggaaatgcaggaagggcttacaggttggttgcctggtgcaattttctgtcatgcagggaaaccaagactgagagagggaaatggattcacctcctgacacagtggacaagccaggacttgaacccaggtctctttaatacagtttctgccatgtttccctgacactcacacagagaaaacaaatctacaacagttatgtctccacttcgtaaaccttccattctccatcaccacttccaaataaagaataacggttgttacaggaatatgtcattacttgcccatttcgaattgccaaccagggactcccatttccaacatgtttatgtaaaagattaggagactctttgctctaattggtcatttttccactgagtaatagagttgcatcattgttgaattggctcagcctgacacaggcagacacactgatatatgtatgctttaatctgttaggaccaatgaggaaagaaaaccgttatttactttttgtcctgacctcaccatttagccatggctctttgagagcatacttcatttactgaacaaactgctcagtagcatcaataacttgttttagattcttttaaagaggacttcatatggcattcaatccttgattccccaataaaacaacacagctgttcccttgcagctcgtctctcagcaggagctgcaaaatcatatttaatcaactttgctttaaaagccatccagtttcctttagggctttggcgaacttccctggccaggatggcccctgctgacatgtcagcagctacagcttttccaagccctggcggagggagttgccatttgctgagcactttctcatgtgccagtccctctattgggcactttaaattcaaggttttatttaatccacatggcagtctcatgagatggggattgatctctgattttaagataaggaaactgaggcttagaagtgtaaaaacatttttcccaaatcaaagagcaacaagtgaaagaattgggattcagccaagttctctctaattccaaaatctgtgcattttctacttttcagtttggctttctacataaagaggtaccaaggaattatacaggggtgagtgagacacaatttagtcagtatgtcaaatttggcaacagagtcccattgctatagctcctaagtctttttaagacttacagctttttcttaccatgatgaaatttgctgttagaatataaataatcttgatggcatcttgtattcaataaagattaacaattattatgtacaatttactcttcaaagtgaggtgaagggatgcagagatcaaataggtatacatcttgctctcaagaagctctaagtctagaaatagagatacaacagcaacatcaaacatgctaatgaaaaatagaaagtgataagtgttatgagtgggttaaattatgatggaaatttgaaaaaggagaagtctattctagctaaggcataagtcttatccaaaactttgaatgtaaagactataagtattttccataaggctttatggaagattgcaatagtcaggatgattaacactagctcctgtgacacccccaaagtatcagtggctttaacacaacaagaatttcttcttcactctttgttggggtgaggcagtgctctcatctatgatgtcactcaggatataggcttcttgtatcatgtggctctaccctttgagagtcctatgtttctagccacctggttagagaagagagagagagagagagagacagagagggagggaatggaggatcaagtggaaagtagaggagccaggcctggaagtggtttacttcatttcatttacatctcagtggacagacaagtcacatggccccaacacaactgaaagaaggatgggaaatgtcttcttcctgtaggcccagggagaaaacagagcttaattgagcacatagcattgtttctgccacaaggaatatgaacataggtgttgcagaatcatttaatttaagaagttgagggacatgcaggatgaaggtagtgtagagggtattcatggaacactttgattcaaaagagattggtttggggtcgggcatggtggctcacgcctgtaatcccagcactttgggaggctgaggctggtggatcaccttaggtcaggagttagaggccagcctggccaacatggcaaaaccccatctctactaaaaatacaaaaattagctgggcatggtgatgtgtgcctgtaatcccagctacttgggaggctgaggcaggagaatcacttgaacccgggaggcagaggttgcagtgagccctgattgtgccactgcactccagcctcggcgacacaccgagactctgtctcaaacaaaacataaacaaacaagaaacaaaagagattggtttggaaagatagttgataccagatctggaaaggcctttagtgacaagcattttccaaaatgtatttttcagaatgttagtgagtaaaatatgaagaatgatttgagtagtcaagtagattttggaaaaactgcgttatcaaattttaattgcctcggttccacaggatttcgatttttagagggaggcacgatgtatcaattataataaaccttttcgatcacagaatctctttttggtagactatcttgtaagactaatattttgtgacatggaatcttaggcaatgaggaaccattaagcaagaaagacaaatgattagacttacttttagaagtacaagccagagatgagttccaacccacatcccagatttgaccaattaataatggctggcattagtgctatcatgaaagaaattatgaaacttcatctgaacttatctaggaaaaggtagtgattgattaataatgtctgctgtagagtaaaggatatagaggtgtgtcttagttagtttggacttctataacaaagtaccatagatgggtggcttaaagaacccacacttatttatcatatatcttccagcctcctatctggaggctggaagtctaagatgaagatccttgcaggtttgcatctggcaaaaacctgcttcctggttcatagatggccatcttctctctctgtatgctcacatagtggagaacagagagaggaaaagcaagctctctcatctctttttttttttttaaaggcactaaccttgttcaaggggattccacccttatgacctaattacctcccataggtctcacctcttaatgccatcatattggggatgagaatttcaacatatgaatttggggggaaggcaaaccttccacagcagggtgtgatggttaattttgtgtatcaatttagctaaactatggtgcccagttgtttggtgaaacagtagtttagatgttgctgtgaaagtattttgtagacacgatgaacatttacaatcagttgacttaaaataaacgatattattcttgacaatgtgtctcatccaatcagttgaaggcctgaaaaataaaactgaagtttttcagagaggaaattctgcctcaagagtaacgaggaaatcctacttgagttttcagtctgctgacctgctctgctctgtagattttgaatttctagcttactggcttgccatccaaattttagacttatcagtccctacaatcatgtaagaaaattccttaaagataagtgtgtgtgtgtgtgtgtgtgtgtgtgtatgtgtgtgtgtgtgagtgtgagtgtaggttcggtctctggagaaccctgactgatacaaggggtgacaacagcatgatggcatttgattttgttgctttaggtgaaggttgcaagttgggttacaaagagagcttgggtgcctgaaagtggtgtcaacaccaaaatggaaaagatttcaggagaagaaagttcagatttggaactttgtcctttagatgtcacctggacaaacaaatagacatccttcagaagaacgttcattcagagctaagcagaagtcagcattatttccagtgtgcaaagatattttgaagagaatgtatatctcctttaggatccttcaacagatacgccacctgtttgcctgcagcagtttcctgaggctgcaatttggaacaaatgcctctagtgacagggaacaaaaagagttgctttgtcctgaaaggaggttaagagtcatttgaggctgactattcaagacacacctgaatggggtgtgaattaagagaaaggagggccaggtgtggtggctcactcctgtaataccagcactttgggaggcctagatgggaggattgcttaagcctaggagtttgagacaagcctgggcaatatggtgagaccccatctctaaaaataaaagaaaaaggaaagaaaataaaacagaaaggaggaaaacggttatagaaaaaggagaggaacatcactaagcgaaaagctgaatggaggtgagtcactgggcatgactaagccatgactaagacctccagggtgatagatgaaggtctcaccaccaggagagtggagtaattattaatgcatgtttgcctggtgagttatttagttacaaaaaccacagcagaggctcttcattgtaacagctcaacaatcatatatagagttcccgcaatgcagacactcactaaacactggggtcacacgggggaaagacacaagtccagcctcattttgaatcagtctttttgtgtgttttagtagcttcccaaacataactttgtcttatcactcatagatgtaatgaggtagcttgattctatttattcaacaaagacttattgatttcctacaacaaaccatgcactgttcttgctatggggaatatagtagtgaagaaaattggctaaacttactccttgccttcatggagctgacattctcatgtgggtgacagaaaataccatgataaataagtaaactacacagtaggatctgtggtgatatgttagagaaaaaaaataaagcagctttatcaatcaagagaggttaggcagccaacatgcaataattaacaaactggaatctcagtgacttttccactcgcctaattttcatcgtgggccagaaggggcctctgctcccacaacgtcactgtcttccttgctctaggactctgactatagagcaacgaatatctgtgctattataggggaaaaaataaaaagagatttctgctgggtctcaccttggggaagcaatgctcagcctgaaattgatgcacattatttccacacatcattcattggaatgaactgattagttggattgacctaaaatatggaagcaggaagtacagttctatcatgtgttcagactgggggaaatcctgtaaatatggcaaacaaaaatagggtcatttaggtcacagtgaggactttggcttctcccatgagtaaaatgggaagccattggagactgtgaacagtcgagtgagtgcagaatgagacagacttttgttgagatcttggctctgtgacccagaacatgtgatctataaattggggcaacaaaacctaccttattagattggtagtaagattcactgagatatttgtgtaatgcctggcataaaataaattttggcaaaatgacaatgatatattgaatttcctataaacctatttgtttcatcaaatgaggatgaatttcccccaaagcaaaaaccatgtctaattcatcattgaattctcaattcctaatacaagattggacccacttcattcccctaatatgtgtacttcattctccacaggatggctgagaggagggaaaagatgcagagagcatctgtgtatccttgctgctaagaattcaccttttttaaaaaagggagctgtcaccttgaataaaaaaggctgaagcagcaattcataagccacagttaatgatcaaactcatggcaagtcagctttagaatccagtggaggcatgttctctgtggccttatggcttgggggactgtttggaatatggttagctgtcaccttatatttctgatataagctatgacatgcctgtagctgacacatttgtccgcagactctttgttcaaagagaaaggtataccacagttgtgctagtaatggttgcaatgcctagggatagaattacgaagaacttgaaaaatcttgctcttagcatgtgtcaccataatgaatagatcgacggtacaaggtcaaacttaatgcacaatgggaaaggtggaaattttttttattatctttctttatatgtgtctcctttcactgcatagctttttctccacactcctttcatattgatctggcaataatgctaactttggtgcattcaagaggcccctttccccaccttcattttgtcttttctctaacagcacttgtttttcatattcttgaacacattcagctagtggctgtgaatttggagagataagcatataataactatgatgatcatacttcttagtttgcccagaacagtcatggcttttgcccaatgtctaggtgtaaatattaatgataatcccttttattctcaaatttttctcagttagaaaaatatatggtcctatttattatagaaatttatccttttctgaagggccacacaatgccagaaactattatgcctttccaccagcgtgatcctagagttaactcaaagtttcacgtgttgttagaaatatgaggggtttcaaagtcaaccaaaatagctggaagggaaggacattgtcatagtccatccagggagttagcagcccactctgctgccaatctcaaccagaatttgacctccccatcaagttctgctgtcacattatcctcctctaggagaggaaagatggtggtgacaaagcactcaactttggtctcgatggacctgggtttaaactttgggtcaattaatctatgacagttactgtattagtctgttctcacactgctataaagaactgcttgagactgggtaatttagaaaggaaagaggtttaattgactggtagtacagcatggctgcagaggcctcaggaaacttagaaatcatggtagaaggcaaaggggaagcaaggcaccttcttcacaaggtggcagaagggagaatgaatgcaggaggaactaccaaacatttataaaaccatcagatcttggaagaactcactcattattacaagaacagcgtgggggaaactgcccccaagatccaattacttctacctgatttgtcccttgacatgtggggattatggggattataattcaagatgagatttgggtggggacacaaagtcaaccacatcagttacctcttaatttaaaatttttagcaggaatactaacatatgattcacccagattgttataaaatttaatcacataatgtcatataatgtgaaaaaaattatataatgtaaaaattgtttaacatagtttattgacactattgagtgacagcttttattagtattattaataaaataaaaattgaattttcatattactgcaattaccacagggtctgaaacctagtagttactatacactttttattttgaatcttgatatatacatacagcagacattgtttttcaaaacaatttctttctcattagtacagaaggaactttggatgtgggagagaaagacaaggagaaacctgaaagcagcccagttatgacaatgaatggtaagatattctcctgacctgagatctgcttttacggagtaaataaatgaatgttacatgagcccagtgcaaaacaagcagggtgtgattatgcaggcagtcttggagaagttagcaccattgtcagctctgagggatcataggagtagaacagctaccactgaaagtaaaaaggaatctgaatccagttgttgacaatgacaagtcaagttttaaaaaacctgagtagaatctgctgctattttaataatggttggatacactgagcagagcctctgacagaggtaggatgtgttaagccctggggttccctgcacagtgttgcagcagagtagtggtccctcagctgtgagctaggttaagacctgagactgaaatggatacatttaactcatgcccaccccaatcccaggcaaagcttttcaagtcttgattggtcctgcctctctgagggttttttttttttccactttaagtatatttttgaggttcagagccgtaagaacatatcatggaatttgcccacaagtgataaagtatcatctcaaatttgggcttaacttgtgttggggactcatatttgccttagggagttaaaatttttactatgtaagatagggagagagatatcaaattatggtgtatagaacatctgctttaaaatcatttggaaaactttaaaatgctgacttctgtaccttatctttgacctactgaatcagactatttgagaaatgaatatgaaggttgattagctcacagagttttactatcctcatgattattgagaaaccattaggctagtggctctatgaataggttagcataataaaagagaattatcttcatcaagatccaataatggtagttgctaccatctttatctgaccattgagaaaactgatgtaggaggagttgcaatctgccaaagacccaaaaggatatagttacaaaagaaggagattatttgtttttgtttttttgttttttttgagacagagtctcgcgctgtcgcccaggctggagtgcagtggcacgatctcggctcactgcaagctccgcctcccggggtcaggccattctcctgcctcagcctccctagtagctgggactacaggcgcctgccaccacgcccaactaatttttttgtatttttagtcgagacggggtttcactatgttagccaggatggtctcgatctcctgacctcgtgatccacccacctcggcctcccaaagtgctgggattacaggcgtgagccaccacgccctgccaaaagaaggagattatttgtctttgccatgttctaatggaagtagaggtaagatgcttactcagattcttttctccctgaatcagtgggggacatttccatggaccaaggaagagggatgatttaggccaaaaccctaattttgattatttgatgataatttatattaaaaatatgaaaaaatagtaaccaagcacaaaataattatagtaccttgaatgagtcctggtagcctctgctgtctctgatgatgtcaagaaagtcaggggcattttccaggggcaacagtaactattgccttaagtttgtattttttattcatgttaatggaattggaaaaagcttagattttcgggaaatagtaactcacaagttaccaagcagatggcaatttcctctctgcctcttgcctaaaaacacactttggatgcgtcataagcaaagcccaggcccagttaaagctctgttattcagtccggaagcagttgcttctgtatttatcatggtgctcagggtatagatatagatcttagacatttttagtgagatagtttgaggagcctgtagaggcagagaaatcagtatgaaatctgggagaaaaaaagggcattcatttttgaaacaggtataatttataggaatggacacttcaatccttttctttagaacacagttttcatctgaccagtttgcttcttgcattgcccagaaagcaatcgatcatctactcctttttttcaatgtgatcaatagagaagagtgtgctgacttagagaagagattctcaaacttcaatgcacccacaaatcacctatcttgttaaaatgcagatcgtgcttcatcaggcctgagaatctgcatttctaaccagctgtcatggctgctggtctgtggaccacactgcaagaccaggacttagagcatggtcagttgcccaagttcacttgagaccatgagaacattactgagcttctgagccttcatttcctcattttaaacatttgcatataatacagataatgaaagtgcctaacatataggactattttaagtacagaatatagtccacataaagtgctaaaataattaattgtcacatcatattctatcagtaaatgtttgctatcattattaggcatttgctgtgtgccttctatatgctagggttctaggaaaagaattagaagatgtgctttttgtttcttaaatctaacaacctagaagcggtcagtaaaataggttacatagaggcacataaatctaccatgagttagcagatagatgggtgcacgcttcaatggcaggaatactggtcatggagtaaggaagctggtttccctattcccttgtcgtaaggaattttgtgaaaacctctttcattttctggattgttgtctcatcctttataacagaggaattttacccagctgcatagttctgatggcagtgtctgctgccatcatgcctgctgcagcaggagcaagtgggagccctgccccttctgaattgggatgggagattcccgtgccactgtagctgcccaaactgcagctgcagactcaggcctccctgctctagggagcaggcaggagccccactctcctgggtggggctacagccacccaaactgcaaatgtggatctggccaccctcccaagcacaggatcggagtgtctctgcagcctgcaccctcaggtgcaccaggaaggattccccctccatccctacaggctcaggggtgtctgctcccactgcccagcctctctctgctcctgacacctccaatgtcagagcagggttggagccaagcccaggggccatgaatggcagcaggaggcagacagagtcctaggcggaagtgggtggagtccccagtaaggtcccattctcaggccagggagggcccaaaggctgggggctgggctgccagtttctccaaccagagtggcaactcatagtgcctcttctggcccacccatggccgcccatggacccattcacatgtacttcccctctctgaggtccataaaagccctggcctcagctgggtgcagtggctcgcacttgtaaccccagcactttgggaggccaagccaggtggatcagctgaggtcaggactttgagatcagcctggccaacatggtgaaactccgtctctactaaaaatacaaaaattagctgcacatggtggtgggcacctgtaatctcagctactctggaggcggaggcaggagaatctcttgattctctgtgtgggggttctgatcccacatttcccttctgcactgccctagcagaagttctccatgagagtcctgccactgcaacaaacttctgcctgggcatccaggcatttccatacatcttttgaaatctaagcagaggttcccaaaccttacttcttgacttctgtgcactggcaggctcaacaccacatggaagctaccaagacttgaggtttacaccctctgaagccacagcctgagctgtacattggcctctttcagccatggctagagtggctgggacacagggcaccaaatctctaggctgcacacagcacgcagaccctggtcccaacccaagaaaccactctttcctcctggacctctgggcctgtgatgggaggggctgccatgaaggtctctgacatggccaggagacattttcccccatggtcttggggattaacattaggctccttgctacttatgcaaatttctaaagcttgcttgaatttcttctcaaaaaatgggttttccttttctactgcatcatcaggctgcaattactccaaacatttatgctctgtttcccttttaagagaatgcttttaacagtacacaacttacttcttgaatgcttttctgcttagacatttcttttctgccagataccctaaatcatctctctcaatttcaaagttccacagatctctaggacaggggcaaaatgctgccagtctctttgctaacatataacaagagtcacctttgccccagtttccaacaagttcctcatctccatctgagaccacctcagcctagaccttattgttcatatcactatcagaatttctgtcaaagccattcagcaaatctctaggaggttcaaactttcatacatttttctgtcttctgtgagccctccaaattgttccaatctctggctgttacccagttccaaagttgctttcacatttttgggtatcttttcagcagtgctcctctctactgataccaacttactgtattagccagttttcatgctgctgataaagacacacctaagactgggaagaaaaagaggtttaattggacttatagttccacatgtctggggaggcctcaggatcatggagggaggcaaaaggcacttcttacatggtgacggcaagagaaaaatgagaaaaaagcaaaagtggaaacccctgataaacccattagattttgtgagatttattcactattatgagaacagcatagaaaagaccagcccccatgattcaattacctccccctgtgtccttcccacaacatgtgggaattctgggagatacaattcaagttgagatttgaatggggacacagccaaaccatatcagggatcttcgcaaattatcagatgaccctgataggtatatagaggccttccagaacttaacccaagtattaatatgtgaactctcctggaaggatgtagtgttactttggaatcaaaccctggccaacgctgaaaagcaggccattctcagcaagtggcaaataattttgaggaatgagctttatatcttgtatagcacgagggaaggggaggaactttatccagttggaagaatagcagtaccattggagtaccctaaatgggaccccaatgatgaaatgggagagttgaagaggaaacactttaaaatgtgtgtatattagagggctttgtaagggactgagactagacctctcaatctcactgggctacctgtggtagaccagggatttgacaggagtcccactgccttcctggaaaggctaagaggggtcttggcaaaacacacccttctctcccctcattcaatagagggatagctggtcctaggggatgagtttgttactcaggcagcctctggtatcaggaggaagctgcagaaacaggacataggaccagtagtactttagaggacctcctgaaagtggccaccttggtcttttataatagagatcaggaggccagagagagggaaaggagacagaaaaaaaagcagagagtctcatagccaccttacaggctcagaaaccccagagttcctaagatgtacttgttgacttctgcaaatgtaaaccactggaggtcagactgttcctgagacacaggtaaccaggtccagggctggtctttcaaatggtacagcaaggcttatgggtcccagggttcttttccctggctttggtgattcagactgccattatcatccaggagccttgggtgattatgggtatcaagggaaagaggatggatctcctggactcaagtgcgcctttcattctctccaacctaggtccccctctcttagcatgactgtgaggagctcaggagaagccaaaactcttagttgtcacctctttacgtcaggaccccaattcctgggactgctattcctgggacttcctttatctcccttgtttgaggaggacctggccccacagctttgcctgcttgtgatagggaggcaacagaggagtgggccctgccagttgctagatgcaatgtggcaagggtcatttgggactaatttaaagggttcatataccctcctgaggcaccttttatcccaaactttggtttgaagccctgtaatggaacactagacctaaggcagatgacagtgggagttgagggtcacagcacaggtgagcatgactaattcctgccaaataggccctcccacttcacggatggaggttatgctcatggtatagataaggtctaaggaactcacagattaccgagagtgggaggcttaggctccactcagatgagtgtgaatattcctgtcagctatgcttcccacttcatgggtgaaggttgcacttgcacccatagttggcacctgcacaagtcactgggactcagggatataaggtcaggagaagaaagagggatgccttttcttctcttcatcatgtaacctgggtggttgctgggatggtgaaaggaacaaagggatgcctttttcccctctttccagatgggtaaccaaccaatcattttcaacctgccctcctcaagtgcatcctaaatcactggacaggacttcagagctcatggctcagggaaaggaaacccagaagcctgaaatgctggcaaaagtggaaaggttcttgccattcagactgtggcttctctctttctgtgcaaactagttgcaggaatgatataaatcacttctttacttaatttatgagcaccgttttacttataagccattttggttgacacaatatacatcaataaacacaactagacatatatacccacacacaaactaagatccaatagcttggaaccctggccatgagatagcaacatgagctcactggttttactttgtttgtcccaataggtaatccaatgaaggctgtaaaccaaaatttcaggtaaaacagtttccatatcaatttgatttaaaggtcaaatctccccagaattcgaagaacactgaggccaaacagcaccaaaggagagtatcacacattaagtaaagaagtccttcagaattgttaggatacatttttgtctggattatgtttgtctactataacatctaatggagactcctgaaaatagatttacatacaagatgtaaggaaagtaaaatgtgtctttagtaaaagaatatgagaaagcatgggaatgtaaatttttgcctagttcagagggttcaaagattgttttaaatgagataagagaaaactaaaggttcaaacaagttatggaaggtttgtaaaaattttgtaaaataagtgtgtaaatatattgactaaattcaaaagggtatttggtttttccataaattgaacattggaataaatgcacaacaaggttttcttgaggatttgtctgtaaggttttattttttaaaaattggggtgaaatttggctttctcttgaacacgacttttgtacaatgaaatgtttttgtttgcaaactatcaacaaaagaagggaaggacaaaagacagattatttggaaaactaggtcttctgtcttaatgagtaaacatttttgctttttaaaataaatttgagtcatcattgtagctaaacggatgacttatggcaatctgaaattctattaagtgtttgagtctttacagcttcaaaattgcctttcctaactcccaacttttggaagctacagagggaccctggagtgtccaaagtagaggtaaacaggattatttgacatgtttagttatataggattattgaaataaggtggtgcttgatcttcaggttatattttagtgaaaaatgttaatatgtgttccaaaatagtatgagatttctggagtactgatgtctgagtctgtgttattaatcataattagggtcattgtgttaggttatcgtaaatcacagaggtgaccaaatttctttgtcaattatgtttttgactgtaactaacctaggacattttaacattcatagacaattgttgtcttgttttgatcctcttcaaagaatggattataaccctcaagtgcaggtttcttataactttgaagattgtgaacaggagttgagtaggtaaactgaactattggaagaccaatcttttttgactttttgcttttttcttggaacagtgctgatccttatgtcctgtttttcagaatcaagggtttttttgagctatttgtggctttaaacaattgtagggtgaaccaaccagtgatctctgaccacagctcagaagaaacaaaagggatgggccatcaaactccaaatggtcacaaagatggagccctggatgatggctcccttgtactggggacctttagataggacccaccgagagagagacttgactgtaggtttcccagaacaatgctccttgtcagcatgaagcagttaagagctgtcatcgtctccatcctaacagcagttaggtgtacctcttcagaggggggatggatggcattggctgccgccatcatgccagctgcagcagggaagtgcagctggggctgcacactccatggagcaattgggagacccttctgagttgggatgggagctccctgtgccactgcagctgcccaaaccacagctgcagacccaggcctcctgctctacggagctctgcccaggagggtggagcagagctccgctgcctaaactgcagctgtggatccaagcctccctgtgctcttgggggagctgggaataggcaagatctgccctctcaggtacagctgcagccgcggcataagcggctgcagacctgggcttttggctccgggaagcaggcaggaactagggacaagcgggagccttgctccttttgagttgggggcggaggtgtggtggggtggtgggagatcctgggcgcagctgcggccaccctcctaggcacaggacccaggtgtctctgcagcctgcaccctcgcacgcctcttgaaggagccctcccccacccccatccttgcaggctcaggggtgtctgctcccgctgcctaacctctttctgctcttggcacttgatacaatcttggagccgggttagagccaacctctggggccatgaatggcagtaggaggcagacagagtcgtgggtggaagggggtggggtccccagtaaggcgccaccctcaggccagagcgggcctgaaggtggggggctgggctgccagtttctcctgcctgagtggggactagtggtgcctcttccaggccctcccatgactgcccatggaccaatcagcaggcacttcctcccctctgaggtccataaaaggcctgggctcggtcagagcagggtaggggactgccagaggaggaagagagcggaggtttgagagatgaggagatgaccagctgcagagaggagcaccctctctgctgatagctggagaagatgggatgagagacctgcaaagatattccaatgacttgcctgtggagaggaaccaccctcttcagagcctcctctctgttcagagctgacgacctgcctacagagaggagctacccactcttctgagctgttctaacactaaataaaactttttttcttcacctttcagttgtctgtgtacctcattcttcctagatgcaggataaaaacttgggcaaaggtgccacagccacagagctttccagccagaaaaatggacaccccagagatcccgtaactgttccatcccccaagtcatgacttattagctttgatgaccttagtcaagtttcttgaactcccaggctttattgtcctgatttacaaagttgagataataagatgacagttgcgaggattaaacatcttagcagaaaacatttggattatcatcttgcttctttaagcactcaataaatgcaatcatcattgtcctcctcctcctcctcctttactagtcctttttccttactattttttacaaactctgtgaccttagtcacctcacattagccacgactcatcgctttctaaaatgttcaactattaatatatattggagctatttttacttttttttttgagtggtttctgaaacaatcaaaagattaaaccagaagtcaacaaactgttttctgtactagaccaaatagtaaacattttaggctttactatagacaatatagtacaatacacaaatgggcatggctgtattccaatcaaatcttatttacaaaataaaataaaataaaataaaataaaataaaggtaggtcgacaggacttagtttgctcacccctcctttaaagtaaagaagctgtaaatgttctgtgatttataaggaagtaagtttcacccaacacaaacctgtgatccatgaaatgcaacataatattgtaggaaagtcagtggctctgtgttctccagtagtcctgccttcaccttaagaaccccatagccttagaaccagtcttaccttggagaaggatcaaatctctcttttttaacagctatattaaactgtggcccagataggggaatttatttattcaaagtcagcagctccagggatagagccagcaccagaatcttgatctcctggctccaaatcagggactacatattttctctttagcttgaaaagagaaagaaatcattttcctcaggaaaaaaataacttatttccactagagttttaatatagaaatatgttttttaaaccttcttgttaatggttatgccacagtcagacatgaaaacactgctatatctgcttaatgggaataccagtcccctgtccttgtcacttggatctcatattaaagatctcctttcatttctattgagacagaaaaacaccctctccttctactcacatctagtcagattccagaatcatttctttggcagtaaatcagtagtgaatgaaaaggctactcacatctatccatatcctattcccaaagaagaaatgggaacagaaagccctggaatgaatacaagcttccttctgctaggatctgaatggaaatacttctctccttttaatataccatctgtgtagattttcatggagttccttttcttattttcctatcctggccttgctgaactctgataggataataataataacaacaataataacagttatgatttaatgagaatgtactgtttaccagcattatgccaaatatcttagtcatgtgtgagaatattctgaatcccattttatggatgaagaaattaggcacaaggagggtaagtcagacatgcaaaaagaggattatgacttcagagcagatgatttaaccctgcttagattcttcctgcaaatagcaaagaggtaaaccattttgatataaacttaacgatgtgtacctatacaattccatttatatgaaatgtccagagaaggtaaatggtcagagataaaaagtagattagtttttgcctgaagctgggagtgggaatggggagtgactgcaagggccatgaaggatattcctggagtgatgggaaagttttaaaattgggttaatattattattattctgagacagaatctcactctgttgcccaggctagagtgcagtggcatgatcacaactcactgcagcctccatctgctgggctcaggtgattctcccacctcagcctcctcagagctgggactataggcatgcatcaccatgcccagctaagtttttgtagagatggggtttcaccatatttcccaggctggtctcgaactcctgggctcaagcaacctgcccaccttggcctcccaaaagaataattgtgtgattatagacatgagtcactacacctggctttaaaatggattataataaggctgggtgtggtggctcacgcctgtaatcccagcactttgggaggccgaggtgggtggatcatgaggtcaggagatcaagaccatcctggctaacatggtgaaaccctatctctactaaaaatacaaaaaaaaaaaaaaaaaaaaaattagctgggtgtggtggcaggcacctgtaatcccatctactcgggaggctgaggcaggagaatggcatgaacctgggaggcagagcgtgcagtgagccgagattgcaccactgcactccagcctgggcaacagagcaagactccatctcaaaaaaaaaaaaaaaaaattggattataataatggttgcacaactccacaaatttgctaaagatcattgatttttctttttgcacatgagatgaatgaaacttatggtatgtaaattaagcctcaacaaagctcttaaaagattaaacacatggaacagaaattgtgaaggcttttcttagtcttcatggctgctcctcttgtgtgggcatcttcatttctctttacagccacaatcagatttgaccatagaaaggtcccttctctcccaggattgttaactaccaattctttgatgatagaatatggacagatgaggattaactgcttcctcaatgctaatttattgccaaagcaagaatcctggaatttgagtgggtgcaaatagaggaagagggtgcttcttcactttaatagaaatgagacttttattacaaatggcatatgataagaacaagggactgtttttcccattaaacaaacacaagcatattttaatatatcttaaaaaggtctctatttcaataagcgcatttatgtatttgtttatttacttgacatgcattcaccaaatccttcttatgtgccaggcacctttcctgactctggggataaaacaatgagcaacctagtcattacccttgtcttcctaaagctttcagcccagcaggaaatcttaccttcttctttccatcttcatgaaaattctacctattctcccaggctctaactctattgggaggtaacccctccaatataatccaccacatcattttttctacctctctcttatgactccagtcatgtctacattgcagtggagttatatttgtttactactaattgccagaattatctcctctacaagtctataaaatccttcctagtagatgctgtgattaattcacctgtttgtctgctgagtactcatcataatattttacacctaggagataatccataagcctctgttatatgaatttgctaatttatccatgagccacatattttagataattttcaagcaacaggtactgttctgggcactaggagatttggtggtgaacaggactagcaagatccatgtcctccaggatcttactttagctttgaggagacagtcaatgaacaaatgattagaaagacacagtgaatttggataaataaaggatattatgaaggaactaaacagagagtaacttattaggggtggactgcagggaactacttcagcaaggatagtcacagatgctctctttggggacacagtatttgatcttagacatgaaaaatgaaaaagaaccagccttatgaatagttaggtacaataatagtctaggtagagagaaaagcaagtaaaaagacccagaggcaggaaagaatttggtgtttttttaaggaaaacaggaaatcaggccagtgttgctaaagcctagtgagagagaaaaagaaaaggaataggaagataggaagaatcaaatcatgaaaggccttgcaggccacaggaaggagtgcaaatttcattctatgagcaatggatgaaggacctttaagagcaaagtgacgtatatgttatttgtagtttagtgaaatgattttgtatgatttgtagcaaacgtataatattttggggctaaagcagtgaaatcatgaataaatactttttttttttttttgagacagggtctcgctctgtcacccaggctggagtgcaatggcgtgatctcggctcactgtgccctccacctcccatgttcaagcgattctcctcatgataaatactttgaatgtaaagttccttaggcaggagtctggagacctgggtctggattatagagtgatctcagtgttatcagacatgtacatcagtttannnnnnnnnnnnnnnnnnnnnnnnnnnnnnnnnnnnnnnnnnnnnnnnnnnnnnnnnnnnnnnnnnnnnnnnnnnnnnnnnnnnnnnnnnnnnnnnnnnnnnnnnnnnnnnnnnnnnnnnnnnnnnnnnnnnnnnnnnnnnnnnnnnnnnnnnnnnnnnnnnnnnnnnnnnnnnnnnnnnnnnnnnnnnnnnnnnnnnnnnnnnnnnnnnnnnnnnnnnnnnnnnnnnnnnnnnnnnnnnnnnnnnnnnnnnnnnnnnnnnnnnnnnnnnnnnnnnnnnnnnnnnnnnnnnnnnnnnnnnnnnnnnnnnnnnnnnnnnnnnnnnnnnnnnnnnnnnnnnnnnnnnnnnnnnnnnnnnnnnnnnnnnnnnnnnnnnnnnnnnnnnnnnnnnnnnnnnnnnnnnnnnnnnnnnnnnnnnnnnnnnnnnnnnnnnnnnnnnnnnnnnnnnnnnnnnnnnnnnnnnnnnnnnnnnnnnnnnnnnnnnnnnnnnnnnnnnnnnnnnnnnnnnnnnnnnnnnnnnnnnnnnnnnnnnnnnnnnnnnnnnnnnnnnnnnnnnnnnnnnnnnnnnnnnnnnnnnnnnnnnnnnnnnnnnnnnnnnnnnnnnnnnnnnnnnnnnnnnnnnnnnnnnnnnnnnnnnnnnnnnnnnnnnnnnnnnnnnnnnnnnnnnnnnnnnnnnnnnnnnnnnnnnnnnnnnnnnnnnnnnnnnnnnnnnnnnnnnnnnnnnnnnnnnnnnnnnnnnnnnnnnnnnnnnnnnnnnnnnnnnnnnnnnnnnnnnnnnnnnnnnnnnnnnnnnnnnnnnnnnnnnnnnnnnnnnnnnnnnnnnnnnnnnnnnnnnnnnnnnnnnnnnnnnnnnnnnnnnnnnnnnnnnnnnnnnnnnnnnnnnnnnnnnnnnnnnnnnnnnnnnnnnnnnnnnnnnnnnnnnnnnnnnnnnnnnnnnnnnnnnnnnnnnnnnnnnnnnnnnnnnnnnnnnnnnnnnnnnnnnnnnnnnnnnnnnnnnnnnnnnnnnnnnnnnnnnnnnnnnnnnnnnnnnnnnnnnnnnnnnnnnnnnnnnnnnnnnnnnnnnnnnnnnnnnnnnnnnnnnnnnnnnnnnnnnnnnnnnnnnnnnnnnnnnnnnnnnnnnnnnnnnnnnnnnnnnnnnnnnnnnnnnnnnnnnnnnnnnnnnnnnnnnnnnnnnnnnnnnnnnnnnnnnnnnnnnnnnnnnnnnnnnnnnnnnnnnnnnnnnnnnnnnnnnnnnnnnnnnnnnnnnnnnnnnnnnnnnnnnnnnnnnnnnnnnnnnnnnnnnnnnnnnnnnnnnnnnnnnnnnnnnnnnnnnnnnnnnnnnnnnnnnnnnnnnnnnnnnnnnnnnnnnnnnnnnnnnnnnnnnnnnnnnnnnnnnnnnnnnnnnnnnnnnnnnnnnnnnnnnnnnnnnnnnnnnnnnnnnnnnnnnnnnnnnnnnnnnnnnnnnnnnnnnnnnnnnnnnnnnnnnnnnnnnnnnnnnnnnnnnnnnnnnnnnnnnnnnnnnnnnnnnnnnnnnnnnnnnnnnnnnnnnnnnnnnnnnnnnnnnnnnnnnnnnnnnnnnnnnnnnnnnnnnnnnnnnnnnnnnnnnnnnnnnnnnnnnnnnnnnnnnnnnnnnnnnnnnnnnnnnnnnnnnnnnnnnnnnnnnnnnnnnnnnnnnnnnnnnnnnnnnnnnnnnnnnnnnnnnnnnnnnnnnnnnnnnnnnnnnnnnnnnnnnnnnnnnnnnnnnnnnnnnnnnnnnnnnnnnnnnnnnnnnnnnnnnnnnnnnnnnnnnnnnnnnnnnnnnnnnnnnnnnnnnnnnnnnnnnnnnnnnnnnnnnnnnnnnnnnnnnnnnnnnnnnnnnnnnnnnnnnnnnnnnnnnnnnnnnnnnnnnnnnnnnnnnnnnnnnnnnnnnnnnnnnnnnnnnnnnnnnnnnnnnnnnnnnnnnnnnnnnnnnnnnnnnnnnnnnnnnnnnnnnnnnnnnnnnnnnnnnnnnnnnnnnnnnnnnnnnnnnnnnnnnnnnnnnnnnnnnnnnnnnnnnnnnnnnnnnnnnnnnnnnnnnnnnnnnnnnnnnnnnnnnnnnnnnnnnnnnnnnnnnnnnnnnnnnnnnnnnnnnnnnnnnnnnnnnnnnnnnnnnnnnnnnnnnnnnnnnnnnttttcagtatatggtagatataatattcttaccagttttgttagtgttattattagtgtgtgtacgagagttagtagttgtgtaaatttattattagtgtttaaagtattttattttacattaagtgcctttgttagtattcttattatttgtgtctatattattaagtaacatggaagataaaaatactcatagctagagcatatacataggctgttgttcccttggtaaggaccaaaaactggccaagctgagagcatcttttgaaaagatggatcaggacacagtttcatcttttccagaaggtcagtcctcaggaaaccagacttgagtttgctattgctccagaggtcagctgggatgggtctgggggcctagaaacaagaccagcaaatatgctggctgggagcgagggtggcagcaggtggatgatgccaatcctggtcgactcagagtcacagcacctgcccaagtcaggaactacaattcttcataaagaacaaagaagctacattttactgggaggaaagagccactgggcttgtaaaggagaaatgaagggctgggcttagctctctgggtcaggaaggatttgtcagagaacaaaaatggtaacttgcgagacattagagaaaattatctctgagagaaagacaggctcggcctaacgtgtctttccttgtggttacattatttggtgcttgctgggtgacaaatcatccatttttatcttttatgtaactttagttttgatgttaggagctaagaataactaatacccaagagggtatgaccctggagcaaggcatgctgggaaagcacatttctgggtgcatgttgcctctgtgcctagagacatggattcaaataaaagtcacagctactgtcccaccgggggccattgctttggaaagtttaactgagcttttgaatacatctttgtttgccattcttattcaaggttatccaaagacaaatctgcttcaagagaggagaaagtagtaaatttaaatggacctttcaaacaacgttcagtctaaaaatggagaagctcaagatcaaatacgtatttgaaatcactggctaagaaacaaaattagtgttttcaatgggcatcgtttccttggtcttgctggctcagaagagcaagtgcaagggttgagaaattctgttcttgctcaattccattaatggtcaggcagttgggggaagaaagccaatcacctcccatccttttctgactatttttgttgtctagagttatgtccataagaggtcaactcgctgtggctgaaaagaagggagcgtattggatatttagttgtgaacttttgcatgcataggctgagatgggctagtcagagattaatcatacctgtggggccaatttgttcctttcaacaatcatgggagggaaccatgattattagcgtctctactttatagatgggaaaacagattcccaagaattttggtgactcacccaagaccatacaataacctagtgacagagtcagaatgtgaactggaatctccccaatgcttgactatactacaattattggaggacctaatgatcttttttatcttaccaaaaatcagaagaatgtttagtgaccaaactctgcatctggtcttatttctcttgacctctagactgaaatgttcccaatttctcctctttctgagccatatagcattgccagctggtaacttctcagtaggcttagtgagatcaaatatgtgagagttttcaaattggggtgtttcagcttcaacgaccatcatgtgcatccctggaatcccaggacactggggcatagacaaagcttaaccccatcatattatttgacataaggggaaacagattcagagagaaagaaggagttgctcatagtcacacaactgctgtgacattgcatgtccatcggtgttttccaagaactgatgaaatagatgttcaaggaagctcaaagagaagagataaggaggaaaaacattcattattaacaatctctgtcacttccttgctgtgcaatctctgataggtctcttaaactttttaattctcagctacctcctgtgttaaatagtaatcatattggaaaataccccaaaggtatatgaggattaattgattctgtgtatgtaagtctccaagcacagggcctgaccttagtagaaatcaatgcataggagctataataaggtcttatcaggtcagaagcacagagagaaggagtgggtttgtgagcttgagcgggacattgctagagggagctgagagagtgatctgaggggatgtctgtgagttcccacagagcagttcagtttgggaaaacagaggggtgaagataacaggaaaaaaaagggcatgtcctttggtaaattgcttattgttgcccagatatcactgtggtaacaaggaaagcccctgaaatcagtttgtccacagctcaagatataactccccagggttttcagtggcaagttaaggggttccaaggaggagccaggaatgaggcagtcacagatgggaacatttatttctttgagagtcttccgtttaagatgttctcagagttttggatgagctaaagggctcttcaggctagaacttggtcttggagggcagctttccttccacctggccatgtttatcttacttccattagaaggcaagatgccaactttcctattcaatgaagtgtttagattccatgaggtttgtaaatagcctctgggaactcctttctgaaacttcccataggacttctaaactctccttaatcagagcagattgcaagagcaaatgcttcttattatgggttttaaaaaggtgagtagaccatagataaaaatcatagtaaaagtgggaatttgaggaaggtctgtttgctcaggaaaattttctaaatttcaaggttataaatgaaactgtagatgatcactcaggcaggatgtggtttagtttcttcatgaccatgataatgtttttcacataaaaagataagtagtactcatagaatgatgtagagaaaatcattttgtttgaaagaataaattgttcaagcatttgtaggcagtcattcagttttaagtagctacagacaacccttatctgttcagttacagacaatccttatctgttcatggcaagtagccacatacttttcaccaatatccttttctgtagctccccagtgaagagttgacattaaagttccagggtggagttggagtaattttgttttcctccaggggacacaagtgcagagaatggataaaacacaaacactaacagagaatagataaagcttcactctttaatgccacctcctggagcccatatgaaacccaagagtgaagaaagcaaagggttcttaggcataatagggcattaaggataaccatctcttatttcttttcattccagacagggtttggcctggcagttcaacctgattgcatgaagggttgtggtaggcagagatgtctgattgcctttgaattctttgttttctaaccagaggggagatagttctttcaacagaaagtcccagcaagtgcaacaacaaccgcggcctggtgtgcctctacttgccttggctgcctcagaaagagccctgaacactcctcctagggcctgtctatgaaaccaactggatgtagtcttattatttatcagaagttgccaagcaagcagtggtagacagcaggctttcagggaattatcccagggattccttaccagtcttcaaccagatatcacaccagagcaatacatattccccatgcaagaagcagagtaagcaatccatacccttagatacataacactgattagtgcctctgttgttaaagttatttccctttgtataagatgtattcaatgtttcaatgtttacagtgaatttaagaggtagatataatagttatggtgaaaaccctcattttgcagaagagaaaacagaacattgcctatgcaaaatgaatctaccaaggtccgcagctattaagtgcaaagtacaggatttaaacctgttttgaaaaaattgacaaagtctcagggccttgtcctgggtccattcattccattcagtcacatatattctaactcattcattcattcctttagcaaggatgaatagagcacctgctacgttacaagccctactctaggtactcaggttacgtcacagaacaagaaagacacaaacatttgcctctgcagtaagatatagaataaaatatgtataatgtctccctttccattgtcagccatcaccttgcgcagcacggctttctacttaaagagtgtttattgtgtaggcgaagtgggcacagacaacggacgataatcacaataccagtttaaatactagataaaaggtgctaagtgatctggaagaaagagaggagggcaaaggagatcagaagtgttaggtagaaggacaattacagttttaagtaggatgactatggtagtcctcattgaaaaggtaaatttgagtttgaataagctccagagaggaatctgggaaagagctttccaggcagaggacaaagcaagagaagagattctaaggtgccaggcatggctagagccttgcctgtgagtgacgggagagtagtggaagctgaggtttgcaagataatggggccaaatcatgggggcccatacaggtcattgtgatgacttaggcttttactctgtaaaaactgtaaagtcactgctgagttttgagcactgaagtggcataatcaaattatattttttcaatgattccattggctgctgggttaatattagtttgaagggggccagggtagaagcaaaaaattcaaagaaggcatacaacagagacagtaaaatatgtgcatgaaagccttccagtttgtcctgggtatttatgaagacacctcacattctctttttgcagtgaagtgagcatgatatgactcggttttgcctagaagcgacatcaccatttccaggcctggccctaaaacctgacatgtgttctaaactctgctccttctgcagcaaccattgagaccctgtgttgtggatgaaagcattgtagggtggaaggagctgaggtcctcaatgacagcgtggagcacaaccaccccttcccatgccaaccacactgggctgtgacttgagtagttttggaaactataaaaaagaacattttgtaaaaattccttgtccctctctatttctttcaaccttgttgccagagattgttgagattcacttcctgtttttatttttcaaagcaagaagagcagggcacgggtcaaatgcacctcttctccacatctccccaacagctgcttaaaatcatgcctctgtcctatcacacttttcaacatcacagcctgcctcggggacctaagacacttattatggagaatctctaagtcactctgtgccgaatgtggaaaaagaaaacactataaccacaacaatcattaaaattaaaataaatttgttttccctttcttcctaaaaatatatcaaattattggcaaggtttccttgaacatttcagcatgtttactatttgtttgaattcttttctaagcagattgtcattcactataccagttgttgaaaattatttaaactccccacaccaccaaatatatatatagagaaagacaaatagagagatagatatagatattcttttaccttccttcaatttgatgttttatcagatacctatgtttagaaaatttcaaaggtagaaacccaattagccttaatgatagacaggaagtaaacttttcccaaagaaattaccataattctccctaaacagcctcttggacatagaaaaggggaaatgaggattaatatgcttactacgtgctgggactacactgggaacattatttagaatatttcataaatatcttcagcattactcttagccagcttgtggttaagatggaaggagccagtgctagtattatcttctctgacaaatgataagcaggcacaaagaggtgacatgactgtcaccatcccacactgccaggaagagcatatctggatgtgtggggcacatcactgcagatgctattactttcttttcctggaacagtcagaggtagagaaacactgcaaaactgatccagaacaactgggggatgcatagcagcacagcagtttaggaaaccaccattggatttggccaggactgggtgtggatcttggttttgtccctttctggatgtggtctttgacaatgttgctcagtctttccgtgtgtccttaaacatcagtaatggctatagtatatttaacatggtctctggcgtattatgagtactcaaattgtagccactgtgtttattctagtaccactaaaatgtctcctgattttgaaaggagcatccccagagcattgtgtggctcatttacagatttgtaaaatgtaacatttacctacaccctcaatatctgctgaacactttcaataggcagtgaccatgggtcctccttgaaggtcataactagttaagtcaggaggattcttcaggggtttaggagagaatgagagagctgactcccggaagtgggaagggaatcaccctgactatttcctgtctttgctgctttcctttctcataagggagggctctgggaatgggaggcagcagcatccttgtccatactacacatcctttgttccctcccaccatgggcaaggagggatggattgtagcatagccatgtgagaaccatggagcaaaggtggaaggctagagggcagcagggaatctaattagcactagtcaattatctgttctatgcaacctgatgagtttgctgtcagagggaatgcaaaaacaacaacaaagaatttgtttttcatcttcatctctatgagctcctgtggtgcaactgtcagaaagcacttgccccaaatattttatttattgtcaacttttgcagagaatggagtaattcccatgggatctgctaggtaggttaatggactgagaagattaataaattatagacatggtactttgtgcaatgtactaatgtgtattgaacattatttcattagatcattacaaaagattgccatctgatgatgttttctgttgctataacagaatacctaagactgggtaagttataaagaaaataagtttatttcttccagttctggaggctgggaagtggaagagcattgtgccagcacctggtgagggccttcttgccgtgttacacatgatggtaggtgaaagctcagtaagagaggaagtatgaggggcagaactagctttataaaacccactctgaggataactagcccactcctggcataaaggctttaatccattcatgaaggtggagtccccatgacctaatcacttcttaaagaccacacctcttaatactgatacaatggcacttacatttcaacatgagtttcggaggggacaaacactcaaactacagcagtagctatcccctttttagagataagaaaaatgcatttagcaaagttacatagccagaaagtgtcagagtcagaaatctacccaggattgtctactctagcctcttaagcacccatatctctctattacatctccacatttaaaacaaaagccatggcatatgattctacactgttgaggggactttagggtgcttgctgtttgagcccctgagacaggcctcacatccagtggagctggtgtctggcctcagactgcaagaggagaaagtgcacatctgttagtctttaacatgcatcattgaaattcttgcaaggagtctggatggagctggtgttcttccctgtgcgtgaccttaggccagccagtggccagcaagagagaaacacaccaaggttcccagggaggctctgaacaactctttcccggaattgcttttcctgcccaacctagtgtgaaaggaatgtggtgagtggtacatccagggagatggcctacacggataccttctttgtgtctcttattatctttaggtttttactgatgccctgcacagagagaggtctgtaaagtggcaagcaggagtctgctacaatggaggaaaggattttgctgtatctcttgccaggcccaaggctgcagagggaattggtaatatacttcatttaataatagtgttttaagggacattatcatttcatcctatgtggtagatgtgatcatcttcatctcacagatgaaaagagacaaacctgggattcagaggtacttgcctatgagtttcttacagatttcctcttacaatccagaactgctgattcctgggtcagtgtcctttccaatatggcatcttaggcatggcaataagtgagatctaaaagctagttatttgatgcttggacaaaggcttagggcatgggctttgacctaatgaatcagtagattctagtctaatattttaaaggatttgaaatgattccagtttataagcccctttaactgtcttctaagatgtggctaaacattccaaccttccttagctcaaaagtggacaaaacaagagattacacatgttgatactttgggagtcatagaaaattcacatatacataggcagagtggttctgtaattaaccaaatctttagaggtccaaggttaacagtattgaccattcataattagccataaactcagacattttaaaagcctcatgaaaatagaagtatagttttcaaatgttacagaccccaaacaccagtgttttattgcctacagcaagcatagctcacagatcatcacaaggccttgcacaaaggaagcccagtgaatatttgtagatccgatttaattaatgaaggcacaaaccccctggctttcttgctgggtttcatgacatcttattaaacacactttatttagcaagcttggttatttgcttttttttttttgtctcccagcagattgaatgtaagtgacttggaaaaggaagaggagttgccagaaacagctaaaatgtcagtagaagacttgacagcttgagaatagaggaaaaaataaaagcgaagcagacaaaaagaaccttacctcccccacaatacaacattgggctgctgaacccacaaaaatctaaatccgtttagaatcatctatttaactcctcagagacatgcacaaactattctagagaggcttgtgcctacgaagattacttaagaatgtgttgacacatttggagggggttaatttaccagttatcatttactagaaaggctttttctataagaatatatgaaagagtttcctcggagcattcaaccgggcttctttgtagggtatgtgtactgcttggagctacggaagaccacgtcctagaagtgctgtgtccctgaggcacacctatgtgtgttatctctctggcatactttccaacaaggattcttttctagtctatacattctgattaatttgcagtcagaggcaatgcaaaaagcattccttttcatcctaatctctgtaagctccaatatggtacagctgtcagaaagcacttgccctgaagatttcctttatcatcaacttttagagtaaatggtatagatctgccactgcctattctggtttcaagatttggtcttacatcgtttttttcctttttgtggcaaacaaaatacaaaaacaaatcagcaaacaaaaaatgaaaacaaaggaacagacatttatatatatgtatgtatgtatatatatacatacatatatgtatacatatatgtatgtatatatatacatacatatatatatagacagagagagagagagagagagagatatgtttgcatgtatagttagtgatatggtttggctctgtgtcccctcccaaatctcatctcaaattgtacactcataattcccatgtgttgtgggagggaccctgtgggagataatttgaatcatgagggcagtttcccccatactgttctcgtagtatgtgtgagtaagtctcacaagatctgatggttttatcaggggtttccacttttgcatcctcttcattttctcttgccaccgccatgtaagaagtgcctttcgccacctgccgtaattctaaggcctccctagtcatgtggaaatataagtccaattaaacctctttttcttcccagtctcaggtatgtctttacaagcagcatgaaaatggactaatacagtcagatagatgatagatatagatatagaagtagatatataggtatggatttaatgtaattgttgttagcaatgaattatgagcaaattgtctgtagaatgcaagacagaaagaagccttctttctatgctgagtttatccatattcctatgacactgataattaacactgtaccaattaattaattagtacaattaacatgtattgattagtcactgtccataagcaaagccccgagtttgactgaggtgtaaattcagtgtgtggctctagtatgaatgaatgaataaatcatattgatgtgcgtcatgggggcaaggcatagatttactgtgctaatccacgaagatttcttaaagagttaatcactagacataatgtataatgtcaataatggacataatgatggattaaaaatgtcaatggtagaaataatgatggcaatacagaaaagagttacattttattggatatctggtgtttgtctaaaataattcttactactttatctatactctcacaataaatcctcataagaacacattgagacagaagtcattagctgctcattattgaacaggaaactgagaatcaaggaggttaactcaaaaccccaattcactcagctagtaagtgacagaactgggatttcaccctaggtctgcttgtctttaaaatccctccctcctccacccttctttctatttttcaccctcccccactttttcttctcccctcttctttttcttctcctttttcttcttcttcgtccactccttaatgctagctaagctcatagatgtcttctttgatgtattatccctgatatccttttcaagagtaaaatgattaaaaatataagcataaacatttattgacacctactttttacaaagcactgtggcattaaaacttgcaatttataaaagaatggggcaatagagcacatgtttgctaaatgcttatgatgaatcaggtactatatattttacattaccactttttaatcttctcaataacaatatctattttattctcattttacaagtgaagggactgcagccaagaaagtgtaaggaagaaactggtatagaattacatgtcctgtagaaactctgacttgcctaaatagtaaccaattcaggcaatgtctttttagctgggccaagacacacagaaaggagtgatgctctgaacctctaggactgaagggcttgcacagcccctgtgctcaagcacacacagagcctcaaatggaatgttttggagacattcttatacagaatatgggaggtataaattccagagggccatttgatggtaagttatcaagtaggtaaaagagtttattggctgaccgaacagttacattcctataaatgatatgatgaatgctaaaaaaaaatgcatgtatacagtgatgctctttgtgcatgctcttaaaagaaatagtaaacaaaaatggtataaagtaaaagttaaactcaaataatatagacacttcataaaataatagcattgtcatacaatggaacaaaacgcagctgttaagatgacttacacccatattcaatgacatgaaaacatgtctaatgtatagcccaggtaagaagcatttcaaaactatgtattagggctgggcatggtggtttacacctataatcctagcacattagtagagcaaggtgggaggaacacatgagcccaggagtttgagaccaacctgggcaacatagtgagatcctatctctttaaaaaacagaacaaaacaaaacaaaatctatgtattagatactgaataaatccatatttctagaattaacacacacatatacacctgaaaaaaatgtgtatgaacccacaactttatttttgattggcttttgattgtgggatgaagaataatctatacttctttcttaaaattttcccaaattttttgttttctaataatataaactaatatttattgaatgcttacagtgtgaaaaataacttatttatacttctttcattatcacaataatccctattttaatattatgcaacctgaggcacagagaggctgataggctacccaagagagtggcagagctcaaatttaagtagattttctgcttctgcaagctcacggtcctatctactactttatactacaattgctacttaacaattttgacattaaaaagtacaattgaacaacactaataaaaataacttaaaatttttgcttccagaaaatgcacaattatctgttaattttacacaacataataagtggagtttccactatttcatcatttaaaggctaagccattcttcattttcaggtgtctccatttctttatttttgacaacatgtctttcagaagatacttaaaatagatattgtctaatgttttcttaactcctgggaaagattgccgcacggaattatttagcatccaaggtgtcatgggatgttttaagaggtagagtatgtggttttagtggtggtatggttgtttctttttgtagaggaatttatggattgccaagtgtcaaactcaagaggtttaattgcaatttaacttccaagccacagccttcaaatgtatttgggactttataagacatagtacagctcccctgagaccccaccaccctgtgggctgctctatcatggtacttatcatggttcctaaagcagtttgactttttgtctagatgtttcattagactgaaagctggatccgtcttgtcaactgctgcatcctcagaacttaaacattcagcttattctgaagtctgctagttcgtagggccaggaagttctcaaaatgctagtattgaatgcagggtgcatctcctctcctatcccccttaaagctattttaaaaagtgtgcgacatttctgcattctgtaaatcaagatggaatctatctcttggaggagacttttagatgtgcctttgttaccttagagatataggtaatttatcacttattgttctaaggaaagtttagaaccaaagtaataatgtagagggtttgtcctcagtctagaatgtaaggttctcaaacaaaggatgttcattttaagcagaaggcatctctcagtgatgatgatgatgctgattttaatttcttcaatgttctggtggggttaagagacagcaggggttaaggcgacctgagaaaagcaacttttctcctgtgacacctcaaatgctgagaaaaatgaccatgggggtgtcctgtaaagagaataaagagaaatggtgtgtgtactcaagggggagatattttgtatccagctctgggtttttatttatgcattttcactctcttgtatcatgctcaagccttagcaaagtttgataaagttgagtgttttgtctcagctgatggaaaagaagttgggggcattgacctggaatgagagatgagaagcccaactaagatagatttgtggaacatacaatcacttcctagggattctcagaattatatgggaaacaggcaaggcttcctgcatactcagtattgggacctggatcatattatttggatgtgaaagggaaagctgccccaaggaggatagagagcctggggtcacttggcttacatttggtttagaaaatttaagtttcctataggataaagagcacagggaagatatctgtcaaacatttcatagcccaattaactgaatcagttatttattcccaaatcactatagctttacaaccataatttgatttcatattcccaaagatacacttatctggtaaatattttatagagttaaaatatctttgagaaaacataggtttttctgaatcctgatattgtggcaattttatcaaagcacagtgaagctccagcttagaaaaattaaaaccatgatcagaaaactgtcctcatgaaccaatctctgtctttgcatctccagcataactgaacaattttcatgcatttctaagaacaaattgcaaacagacatcccaagaggatgttttaacacatcaccaatttggaaacgatggctggaaatgtcagctaggagaaacttttagacacatatgatgggatggaccagccataggcacatatctcttagactgagagtggtaaacctaagaactggagaagcagggttaaaagaacaagcccactagtcttctcctccatgaatatatgtgattactacagtgtctccttatcctctcaaaggattgctgtctttggcaaagctaaggatctgaacggcaaaaggaggtgattgatggtccatgattggatttccagagcagaagctgaaacctctgagtactgactccacctccttgacttctcccctgccacctcctccttaactgatggccagtggccaactgagagtcccaaccagggaaagccatttcctctccccagcatgtctggagggcatcatcatcttctgtgcccatttctcaggtgtattgccacatcagtatatgatctgagatggtatctccagcttcctaaacaactaagggagatcacagatcaaaggctttgggaggaaaggcaaggccagtagcaaggggaattctttccagaagaaaaaggtaatcacttctcaagacataatctgacccaagccagttaatatcatttgcatcttgcatgacttttgttaatggggctcagtcaacttgacatttttaaatgtttcattgttttagttcttctagataaaatcatgactgttcattgaactgttgtatagactatagactaaataaaagtggcttttaatgtgtataatgactaatctactccatttttaaccacaactgaaagctatgaatgaatgttaaaattttgtatcaaagatactcaaacttttggagtttttctttatttggaaagacagaaatgtttactttttattgttaccactctcattttacatagaataaaatgaagattaaattagctaaagacttgaaatgggacaaagctgggagtattccaggttggatgagacggaagcagtgtcctatcatgaaaaaagtattgataacaagtatcagacaactttgcccactgtcttgggcttggagatacagtggctagaaaattatgccctctgcctccagggacatcagtctcacacgggaggtctctcagaagcagaaaattgcagtagagaaatgcaatctggtaagtgctacaaggggagaagaagacaaactgggaggccaccctttctaatggggggggaaatgtgatatgccaaggaaaactctgaatg

SEQ ID NO: 6930 - DNA, 12951 bp, Homo sapiens
gccaaatggcggcccactgtcatccaagaagaagatttgtttcatgtaaaaagagatgtactgcccataatatacttcgtcaaaactagaaaaaaaaacaacaacccatattatattcaattagaatcttaactgtaaacaaaaactgtgaggataaatgtgtatgtgtttccaaatgactttgagtgagtgatcagcaaaggctggatcttttgccccaattgtttcccatccccaaatattaagatgcatacagcatcacccacccacagagacatggggaattcaccaagcacagctggcactcagcatgcctgcccatacagattctgtctctcccttgtgtttgatttaggtggatactatgagccaacctgctgaaagacctcctgggacgcaaggctaatcctgcttacccacctacccaacccccccacccccgcccccaccagcagcacatgtctgtggctagcgatgacccaatgaaacggctgcaagtatgaaaggaaaacgtgggaatcaactgcaataacatgttttcaatcagggagaggtgaagataaccaagaaactgctgtcaatttctcaggcatgataatgcaactgtggttatgtgatttttgtttttaagaatcctcagccaggcacggtggctcacgcctgtaatcccagcactttgggaggccaaggtaggtggatcacaaggtcaggagttcgagatcagcttggccaacatggtgaaaccccttctctactaaaaatacaaaaatgagccaggcgtggtggcaggtgcctgtaatcccaggtactcgggaggctgaagtaggagaatcacgatcgcaccattgcaccacagcctgggcgacagagtaaaactatgtctccaaaaaaaaaaaaaaaaaaatcctcatcttttacagatataccgctgaattatctatgaatactaggatttgctgcaaagtaaaaaccactgcagggaggggcctggctgtgaactgataaggtgaagctgggtaatgaaaatactggtgtgtgtggggggggtcattcattatacttgtctccctgcttttgtatatgtttgacgttttccataataaaaagttaaaaaagaacatgcagcagggcggagtggctcacgcctgtaatcctaacactttgggagacccaggtgggtggatcatgaggtcaggagttcaataccagcctggccaagatggtgaaatcccgtctctactaaaaatacaaaaattagctgggtgtggtggcgggcacctgtaatctcagctactcgggaggctgaggcagagaattgcttgaacccaggaggcagaggttgcagtgagccgagatggcaccactgcactccaacctgggcgacacagcaagactccgtctcaaaaacacacacacacacacacacacacacacacacacacacacacacacacatattaatcagttaataaagagcccttcaataataacagcaatcacttcccattatgacaaaaacacattctaaaaagtgctctcaacagtgaagacttacttccaaatccattaatcctctgccgtccagactttaaaactgttacttaaggctggcaaccagattttcctctactgcacccctttaatgggccaaatttcacctgttacagactcagaaggcaagacctaaaaggtgtactctgctggggctgtcctggggacagactggtctctcctctcactgccaaaaacacctatcaccaagaagccaggatttcactctcccatttatgctattcagtaagggcgcctcctgtcacaaagtacaattctagattcaccctgggaatggagtcatttagcttacaccacagcccgcgggtaggtgagtcgccacagccggctcagtaaccccatcccagtcagggccacaaggctcaagttgatgtcagccgtcaccactacagggcgcttcaaaaatccccacatcttgtagaaaagcgggctcaggcagacgccctagaaaagaagggaggagccgtggtccatgagggctcacgagaggctacagaagggatccccagccacccggctcccggacacacgaggagaaccacagcacagccgggctgctgagaaagaccgaagttcctggagccttggttcaggtagacatgtggggtgaggggcactagcagtgaactcgggtgggaattcaggggatctcaggactggacattcactcctttcaacaactcattccacaaaacctgccgagcacgtcttgggcgcgagaacactgctaaggaacgccagggtttctcccctccctccccgacgaccagaagcccacagtgcggccacagctacctgaccctgggcagctcctgggtgccatctcagctgcttacagcccagggaccccaacctggccgagcctcggggcctcctcatctctcctcaaggatgcatctgcccccagtgcctccctgccttctatcccagcggcacatcatccccgggtgctccctttctcgcctggagggtgcatttgcaccctgcgcccccacgttctcctccaggcttcatcttcccttgagctccgcttctcttgaggctgcatcaggcctgggacaccctgtctcacaccaaagccgcatctggccgttggcgccccgctggtctcctcaggccccatctaccctggacgcgcccttccctccctgagctgcatctgccttgagcgccttcgtcccaaaaggtcccatctgtcctgggagtgcctcctctccccttgcagaccgcatctccctggccggcccttcttccccacaggccgcacctgtcccgtccaccaactcccgaggctgcgtcggccccagctccgtcctcaccctgagactgcacccgcagcacgcccttcctccctagggctgcacgcgccacggagttcttacttcggggctcggccgcccgaacgccgcatctgcccgggcccgaaccccgcccccagctccggaaagacggggacgcccccggccccagcccgtccgcaagccagggacccgcgtccggcactgacggactcccccaagtccgggctgggctctcgtccccggtgtccccaaatgtacccgcgtttctccgagtccacacagagccgcgcccggctcccggcaacgcctcggaaccgtccgactgggccgacggttgggggtgaggccgctcggcactccgcaccacccaccgccctgctcaacgttcgattcaccgagcctgcggggccagacgggcagcagcgcgcgtgcgcactgggagagggtgacgcgcgtgcgcagcgggcgagggcgccggtcccggaggagaggcaggtgtgaaacgcggcgacctcccctctctcgggtgctactgttttgtgtgccaggatttctgtgtactctaagcagacgtgcagattttaaaaagcgcagtgggctcccacccatcttctgctccttgctttttcactccatctggcgtgaagatcttaattctgcgtctgcacaacggcgttctgccgggcgcgccagtttgctcctagtttttttcttttcttttcttttctttttttttgagacggagtttcgctcttgttgcccaggctggagtgcaatggcgcgatctcggctcaccgcaacctccgcttcccgggttcaagcgattctcctgcctcagcctcccgagtagctgagattgaaggcgcacgccaccacgcccggttaatttttgtatttgtagtagagacagggtttcaccatgttggccaggctggtctcgaactcctgacctgaagtgatccgcccacctcggcctcccaaagtgctgggattacaggcgtgagccactgcgtccgaccttaattttttttttaagacacggggtctcgctctgtcgcccaggctggagtacagtggcaggaccacggcttgctgcagcctcgacctctctgcccgaagcgatcctccctcctcggcctccagagcagctgagaccacaggcacgtgcccccacgcccgcgggcgctcctagtttccttgccgaaaaacatcgatgccacgatcctgcttgcacatacatctagcggtgaagtggctgagggtaagggcatttaaaacggacctagggccgggggcggtggctcacgcctgtaaccccagcactttgggtggccgaggtgggaggatccgtgagcccgcttgagtccaggagagcctgggcaacacagcgagaccccgtctctacaaaaaaatacaaaaattagcggggccccttggcgtctgcctgcagtcccagctacaagggaggctgaggcaggagatcacttggggcagagaggtcgaggctgcagtgagccttggtctcaccactgcactccagcctggactacaaagtgagaccgtctcaaaacaaaaaacaaaaccaaaaaaacctggacatcagtgggggctgcatgaccatcagaggctccagtgggggcatctcccctaaactccgtggcagaagactggaggcttcttcctccattcccagggctcctcctcatccatcagcctctccagccccctctgctgagggtcaagagccttcccaaaggcctgctttggagcagacatggtacttttggttgggtcaatgcaccccttcccatgttttccctgaacagtcggcacccagagcagggtaactgacagcaacgcaaccaggctgatggatcactcttctcagcctcgctccttcttgatctcctggtctatttgtatgttaatctatacagaccaaaagggcacactgcaggtttaataaccttcattatggttcttggctgcctgcaagactttttttccatgttgggcaacatagcattagatgacaccagttagaatttcgtggttacttctttatggcttacccttgaggggttatgtgactcacccaagatcccacagagaggcaaggagctggggctcacctgggtttgtggccagagcctgcaggcaactgtatttacagtgggcagggagggttccctgggccccaggagggagtggggctgggctgttaagctttggttcatgccatgctaacagtggtggtgcctcaggacttacagcctccatcttgcaagcccccaaccttaggactagcctctttcagggctggtctccgtttgagattttgtgagccacctgtccctagggagcagtaaatcagggcagtgagtgtggctagttaaagctgagatgcccatggccaggtccccaactctcttccatagtcaaaaggcttagaaggaagttgagggactggggttcctcatggaaacagcgttttatttcttgggggtaatttataagttttcttagctggttctaggcactaagctaaaagctactggtgactttgaatccacactacgccatgaggtcgataccattacaatctgtgttttatgattaaggagactgactcaggtggtgaaacgtctttccccaggtcagtgaggcaatggcaaaaccgagaactgctgcctcagcccattcttaccttttacccttcgctaccccaggcctggcttgctccctccccaccccaaagcacagcataatcctcctccacttcctgcaaaagcaccgctagaagtgacaacacaacacgccacatcaaatgcttacctcctctgaccagctcgtttctcacggcaagtgacggggccacaggcaggcactgtgcacaaccagatgccatccgtgggaagagagtggagtgcttgatgctgccgcatttggaagatgcttcttagccacgggtttcaatcccttctctacccacacagcttctgttaaggcatttcagccgtgccactcctaatttccgtgtgaactctgtaaaattagaattctttgatctgtaggtctctctggtcaaatgaccaagaaacgagggatgtacaacctgagaaagcacgttcagctttatctttttaaactttttttatttaaataaggagaattctttcatatggaaagagctagtacaatcacatatttgaaaggagaaacaataggtactgaaccggagggaaagggcgagggtgagtgtgccagcaccggcctggtgaatccacgattcgatttcccatccaaggtaagtttcccaaaataccgtataaacaagctgcacattacacctctagccatcgtctgccctttcaaatatctggtctacatggaaagacaaagaggaaaggccaaaacataaacaaaaggaaacaaaaacaaaacacaaccctctcaggaaccaaacaaaacccccaaatccttttttactacacaaggcatgaggtcaaaagcttgagtacagtgtcccctttagatcacgggagaaaggcgtccacacagagccttagcaggaatttccactctgaggcttcagaacatgctgaagatggggctctgagggtgccactaccatcctggaggccaccaagtggggtggaaacagtgaagagcaggtctcacatgcccgaagaccaccagccaactacacattggtggccctggtggagcatggctgggcgacagcgtccatccccaacactgagccactcctgtcctggatgacttcctgcttaggtccgtcacatttcagaagagagctggctttctggaagcctvcgtttcccattcatcacagaacacgacagagtgcacacatcctggtatccttggtcttcaaaggccatttccagcagaccctctaacccaggcttgttctgcaggaagtgaaaagggacaaatgaagatttgaggggcagcctgcagctacttggcacaggggaaccaaatggcaagggagaaggctccaccagagctgccatgctgccgtagcaggccagaccacagcatggctgtgcacctgtgtgtgctcagcttccagaagctgtcactgaccatcccgaaggcagatccagaagataggagggtgacagcacggctggagagcactgatgtcaacgtttaacaaggttccccagtgtccctagaagtggctggaaggaccacagctttggaactgaactgattttcttgaatgtgaaataaagtcatcttttgttttcccccttaaggaacctagagccagagtgtctatgaattccaagtttgaaaacaatatgaatgtttaaaaaaaaacaaaaaacgctgtggggagaagccaacagttaagaaaaccaaaccaaatgcagctggcattgaagtccccagtgggtagatgggcatctgagatgtatacccacactctggacttcatcccactctagtggatggtggacaataccgcaaggccactggtggctgagcaacgagccgcatccccagtgaccaaggcagagctgccagcgtcaggagggcaactttaacaggcaaaagtgagtgggttctgaccccccaatccctacctcagcagcaggaaagggaagtgctggtctccacctgttcccactaaggccccgtggtatcctggcagaagcctctgcatgtatctgcgctctgaggatgggggtttgaaaacaaaataagaccctacgtcctactaccttgagcttggctctaaaaccacgggaaaggaagagatatattgcaccttaaaacatctctgcactaagaactgcatttcattagaccaaggaggggttggggcgctgggaggcctgaggcctgccctcagccccccaagtctcatttaaaacctgcatctcagcgaagagactgcagctcaggtcacacacaggtggtgactgcaccgaacttcacatgcaatttcctggcctttcctgcacagaattaattcagacattatatataaatagagcagtgaaacatttacttctttttttttcacctagacctacaacatcaatacatataaataaattctagtgttttttgtttttttatttggggtgggggaggagaaaggaaggaaataccaggtaagagaaaagggctggagaacaggtgacctttttgtttttattttttctcaaacagcaagtactgtgggtctgataccaggttcacctgaagggtacatcttaacagcatccagaaggctttcttttgacaaatcacacgcaccaccgcatcaggtgggaggggtctggccatgcggctcaagtgtccaggtggagatgaatgtgtggctcccgcaggcctgaactcacccaggaatggcttggcaaggagggccggtggggacagagagggctcatcccaggccccacaagcagccgcttgcagtgggagaaggaaaagcagacaagaagctcaggtagggaatgcctggaactgtcgggtgggcagcccctggggaagggactcaagcataaaggcttgggataaagagggaaaagaccaggtgagggcaggaggggagctgctgaaagatgcaggtgaacagtaaagcacctttcagtaaaactgccctttcccaggcagctctggggtgggcgctgttggtaggaggccgttctcccgcttccttagaattgtgagagcagtaagaagttacttcagcagttcctaagatgctccttccccatgttctacactagacacagagcttagagcccaagcctgagcgctgtcctgcacccgtgagacgctgaaggcagcctctggtggggggtgcatccccggccccctcctctaggtgttctgagccagcctcctctggaggaggaggtagacgctcagtgacccctaagaacagctgagaaacctgaactgtccccttccctttccttggaatgacagaatctggagtgatttccttgtttcttacttaaaaacaagcccagcacacgatggctcacacaagcctctggctggagaagctgccctcccggaggctgcgcaggccctttggaccttggtcagccctccacccagcctcaccctggacctgcccccgccgtctgaagacaaacgagactgatgcctactgcttagctcaggccctcctgtcctgacaacctgggtctgctgctgggagtgaagcaaaggaggaaaaggacaaactcccagtggcctcacttggggaccacacacgggtccactccctccatcaccaagtggtgttcacgatgagctgtgtgggaggtggagacaggtccagagaaagcagcaggctccggaagaggaaggaaggaaaatgacaggttacagaaggcttcagggaaagaaatgtgtgaaaaacacagcacccctgcagggcagggtatggagccccagaagcagagcccacggggcctgggatgggcctgtagtatgtcagctcaccccatctgggccaacctgggagccaccagcagccatctccatgatttgtctctggtgcccagcacatccactggctttagaggagcccaggacagggaccctgtgtgattctcatgctaaaactgtcatcaacttcatgggctgcctgtaagcgccctgggctcatcaagccaggagctggaacccaactatgaccccccccctcccccaacctgcctgctgctctgagcaccccatcgcttcccaggcggggagccaggcaccagaatgctcgcaatcggtgccctcaagaacctccttttctttttgcaaataacctcaagggtgaaccagctgaggaatcaggaggggatgcattcttaagagtcacctcttaaggtactgcagtgacgtatcaaactaaacaggacagaggctagagatggaagggagcggaggggctggcaagaaacatataaaagttcagctatacacatggagcttgcgtttttgttttcttttcctttcccctttgtaaaaaccttggctacattttaaaacaaaaagcctcaaagtaaaatgaccctgctgccaaatcactgtgcctagggatgggcggctgggccggaagcactgctgagaaggcgccctggctgcgcggcaggacagggaggaggcagggagggcaaatctgcactgcacaggaggcgtcactccacagtcacggtaggagcagatgggatgaaggagtcgtctgcttttttgtttcgtatcaaagcaagcgggtcaatgccatatatccacgggtgcaagctggttgacaacggagctttcgggagtggagaggagggaggtctctcagtctgggccacgcatttggacggtggatctggtgaggctcccgagtgtcggctgtgtcgaggccgcatggcggcaccgtcctcagtagggagaggcgaggtggcagccaggcactgtcaggccttactctcctccactttgacagcccgaggcttgatcgctccggttcgcttcatctgggaggcagccgagggggcctcctgcagcttcacggctcccaggctgggtttctcatccactcgttgttttgcctttggacagatgaatgggaaaaacaaagtgaccctgacgctgaaacgtgtttggatacatagttcccaccactcccttcctgctcctgagttgcagggaaagctcccctaagttgtcagtcccttggttgaaggaccagacttagaaacccccctcctagtaaggaaagtggcgcgagtgccgtctctgctccctccccataagccctgagtgcagtgattcggagaggcaggaagacaccgggtcctccacaaagaattccgcgatggcacatcccagggcggaagcagttctggtcccaaggccaactggaagaaccttttcaaatcagtgcacctcctgccccacaggcaaaaaaggccccttcaagtagatccaagtgccccctgcacgtctcggagcccccgactgtctgctggggccctaggcagacttggcccccacagatctctggccgcgattcagccaacccccccaccattcccactctgtaacctttccctggggccccattcctagtcagggctcccctggtctgtggctctacacggggagtggggtggggaagtcacagagcagccagcgcatctgccccccaccaggtctgaactctggaagaaagctttagaagctcattccacacaactttcatgacccctaggggaaccaatgagagcaatcacttcccatctctaccagccaggcacagtgactgattaaaaacccacgtctgaggggcttaagctctgagccccagcacgttttagagaatagagaagagaatagtgcgtgcaggaaaagacactgcgatgtccttttcattataaaatgggaaaacttaatttcacctgtgctcccacccagccaagacaaagatgagacacaccactgactagaaccagcgcgcgcaccccggctcctaaagccgacccccaaacctaaccgagtctcccagggcgcctcagccccgacctgccagggctggtccaccttccagcaccacctcctcagaggaatcagcatcctcccttctctgcaggacaaggaaggatccagacgcccgtcaagaggagaaatgccttcgccaggagggacgcgggcggcccagctcccggttctgtgctctaaccgctagggcatggctgtctttagacagggggcgctcagataggttggacagtcccttctcttttggcgcttggagacgggcctaagtgtccagggctgaagggtctggaaagccatcttctacctgttgcacgtagtgtccctgcacagagcccatgttaactgctgatccagagggcttcccactggggctagcagagctaggcctgaaaaaaccaaaggcaggggttgagaatacacaacgtgtcaccacagaaatggagtcaaagcctagcacatggaggaggcacaaggaaggaagggcctgcggccagaggcgctcactcgggacggtccgtggatctcttggatggaaaacaaccacagacctaagacagcccagaacgcagaagggtgagggggtggctgtcactgaccaccctggcacctccaggacagagctcaaggagacgcaccgcaagagagggaggctgaggccctgtacagatgggcatggctgtcctgctgtgcagaaagcgacactggccgtctcagggtctggaccaacacgatgcagtgccccagacaaaaggcctagaagcctgacgctgagccagaactgtgccgagtattgttctagtcttcacttttcagaaaaggggatgggggaaccaaaatgtacaacatgcttctaaatgtgttccactgaccactagttagttcccagggatgttaattaggtgctacgtggaaaaaaaaaacgtctgcggtcaaaaagcctaagtgccgtgtgcagagttcaacaggactctcaacctaggcccgctcagcctgtgtggtgagtaccctccccagcaggccaccctggggacagcactcccccaaggacctgaccagggaacccttgtttttgcagcgcacatctcagcagctctatttccagaacactttggcaaacactgctttatacaattatagcaatttccccaacccccctaaaacaccatagaaacaaagctactagtttaaggcttccactttctaaatatgctccaaagaataatctgctgccattcattcctacaactacatagacacaggcgactcttgtcccgtgaggctctgtctctgggttttgctttttgaggaaggctctgtagccagaggctgctggaatctgcctgtggcagcagcgggacagcgtctgctgagacctgcagccgccttcctccttccagttccgctccatggtcggtgctgtccagctatctttttcacacagtcctgatgttttggtctatgtgacagacatggtaggaaaacgaaacgtactaaaaacagaaataaatgaagccaggagagtgaaaataagaacaga

SEQ ID NO: 6931 - DNA, 88277 bp, Homo sapiens
  misc_feature (1)...(88277): n = A,T,C or G, or insertion/deletion polymorphism (see Tables 1-2)
tgaggaagccttgagaatgaatggaagccatgagaaatgtgaaggctcatagtgtgtggagctttgctgggagttgttctggggagagaaggcaaaagactttccagactctgcagcatggatagggagacaaggaagagaggcaaaccatggcagctgctgaagggagggtgtggatcctggggccctgtgcacagctgaggctccagtctcaggggtgctgtttatgcacaggggacccaggaagccggttttctcccagtgactttcagtcctcagaacccctccctacctccagcatggcctgtccaaaacaaaacacatctgcatagatgtagctcaggttgaaattctgacgctggagcagagccctcccaggaggcacctcaggcacatttgttactgcttgttccaaggaaacctgagcaggctgcctgggggagtgaacctggtgggggaagttggcgcttaggcattactgagctgtgtgtgaatctggggcacagggctgacctagaggggagagggctctaagcaggtagactggtgatggaaagtaagaaaatggaagggaccgaaagtactgctctattccccatctgttctcatttccaatccagggagggaagaatagagagcaaaagaagagctgtgagtctcacttaagtggacaggtagaacttttacagagctgggtacatgttcaggcatacaccatcaaggaagatctgagttaatccagaaaggctttttagaagcattgagctttaagcttgataaaagatgaggagagcctggaatgagcacacatatgatgagagcagggttggcaactgcgggaagaatccatgtgtatgcgtgtgcattttctacccgttgctttatcatttaagggtctaggaaattaaagcctacagcctgtctcttgtcctgcttgtctcagatacctcctctctgtatttttctactgtttctgcccatgatttggttggtctctgacccatgaagtctaatttggagcattcacacactgactgcagctctttcacttctttctccactctgccccacctctgtgctccctcagaatatgtgtagagctgctttgaatggctgttaactccttagactgctaacggattcttctttctctgttctgctgctgctactacctctgacttgcctgtcctcattcagtgcatgatgggaaaggtattagatttactgctaatgaggacattcgtccggaaaagggtatgttgtacaccgtgcagatatggatctaacatgggctaacactgacccctgggagctagaatgagcaactcgtgctgggggtgggggaacaagctgtcaaggtttaggagctctatctcaagtcttagagatgggtaatgccttcatatagcccaggaaggggttctgttgttgatctctgtcgtattctcagcattctcccacccctccacctcaggacaaagaaggattttctctggggtgtaagattgtggtggtgttttctttttttctttttttttttttttttgagacggagtctcgctctgtcgcccaggctggagtccagtggagcgatctctgcccactgcaagctccgcctcccaggttcacaccattgttctgcctcagcctccctagtagctgggactacaggcgcctgccaccactgccagctaatttttttgtatttttagtagagacggggtttcaccatgttagccaggatggtctcaatctcctgacctcgtgatccccccacctcagcctcccaaagtcctgggattacaggtgtgagccactgcacctggccaggtgttttcttaaaatagggtggggtctctgctaaggggagcctgtagattggctcttttcagagattggaactggggagttcattctatagaggggcccaggtttgagggggatgaagtatttcagagcacagcagcctcccaagcagggacctctaggaatcctgggcataggtgggaggttgctgcttttggctagagaggacccacatttttccattaagagacactaccaggtcaacataattcccagacacagatacaaggtgatggcactgccctaccccaacgtctttcagttaaaagtccttcagcctaggagataagagttttggggatccttgagagagagtcttagtgcacttttggaaaatgttgcgcctaagatgctgtcagcttaacttgtgttacaagacacagccttgttctttatcccatttctttcccttctcctattgcttacttcccatggttactgtggtgattgcttcttgcttttgggtatagggtggtgacctcctcacccctcaggtttacctcctacagttctccaatggggaatcatctctccatttgtccctcagggtctggtgtggacgatcctgtgggagaagtctctattcaggtggacttgtttacacaccctggtactggggagcacaaggtcacagtgaaaggtgagtgatggacttacaggtctgccctttccttgcccagtggcctcactcatcactcaaaagcaggggctgctcatcccagccctccagctcagccctcctccaaggggaaggtcacctggggttcaagaactgggaaatcctggtgggatccctcacaggtttcccttgtttgggcagtggtggctgccaatgacctcaagtggcagacagcgggtatgttccggcctttcgtggaggtgactatggttggcccacaccaaagtgataagaagaggaagttcacaaccaaatccaaaagcaacaactgggcccccaagtacaatgagacattccacttgtaagttacgggggggacatacaggactctgggatgggggtaagacttgaggggtggggggagaggagggcccggggggatggcagactggggtgaaatcagctgaagactcaactctggcctcataacttctatcttgtgctcacagcctcctgggaaatgaggaggggcccgagtcctatgagttgcagatatgcgtgaaggattactgctttgcccgggaagatcgcgtgctagggctggctgtgatgcctctgagggatgtcacagccaagggcagctgtgcctgctggtgccccttgggccggaagatccatatggatgagacaggcctgaccattctccggattttatctcagaggagcaatgacgaggtggcccgagaatttgtgaaactcaaatcagagtctcgttccacggaggaggggagctgaacaccttcgactcctgtgccaatcaggcagcagcaatttcacaaatcagggccagtgggagttagctgtgtaaccggcttagggtctttgcagtcaagaggctgaccccttcagttaaagatatttaaggaaaaatttggggtggtgataatatggcttttcacagaaagggtcatgaagccctggcccaacaggactgtggtactaggggctgggatgtggggttaccacatggagagattttccattaagagagaaggacaaacatttctgagagtgtcagccattcttggtagacacctctccactcctcatcccacctctacccatctccatgccacaccttatccagttagacacatacataccaatcattagaagaacaagtttagaaggtgtggaacttgtgcctggctggctgggtagtcagctgagcctgttgctgagcccggtggtctggattggagtatggccagggcaggagtacacagaatagaatttagactgtcccttgagtagaatccactgattttctgtggctccagtgagaacaaggctttgaaactgaacaagataacttctagaaatgaactgtactaatccctttccccagattgtatcatgagtagaatcaggttcacgtggtgcttcaaagccctgagaagaatatttctttggaccccaggcactaggggccacctgcctgggagtctccctgcctcactcctctaggcaggggagtgatgcttcaggacgtgacaggctgttctaacatgtgtctacctgagggctagttgaaggatccaggagtattttcttcttgggtgggccctgaacaaagccaaaaattgtagaaaccagtctagaaaaagtcctgctcatctgtggccactgccttctagccgtcctccaccttgcagaaagaatctagcctttggtctctctctctctcatcggggtcatttgctattcccctctgatattcaaccctatagaaggagcctggactctgatccctctgtacaggctggatggaaggggccctccacacttcctgggaggtcagagacaaactgtttcagagagtcagatggacttcccaagacttgttgagagatgtgacatggttcttggatttcctctgtagcagcctcctggacttcctgaggactcgacattgtccacagatgtactggccattacatgaaacaagaaaccaagcatctttgctgttgttaattattatatgtgccattgttacaggagattataggctagtctgtaataaattatcttatagcagcctttggggtttggtaattctgctaatgtgtggaaagccatggaaatgactgtcctttataatggtagattttggcctaatggtcctttgctgcttcacactcctccacccccatacctgacagccagtgggtgaagcctaaagtggttctggataaacaccactgggctaacatcctgtcctagacctgagaccaccaatctaattaacagagtcatgggacctacggcaccagcttcctacaaaaggtccaaaagagtagcaggagaggtattctggtgaaaactagtccatgcttctcttccctttgtctagaatcactaggacagatcacagcctgggttgtgaggacaaggcaggggcccactggggagaggtgtgcctgcccgtcttggcagaggactgaggctgccacagacaggacagaagattaggcttaggactgtaccttggactttcattcaggctctattcgaggaagaagagctgcagtagaaagcccactcccaaaggggaagaaataaggtaaaaggcctcatggcgtggaaatgggaaaagctgaaacaagaaagagagtgctcacctactctcaacctgcactaacactacttgtggggcagggactaatggggcaccagacagggaactagctccgtttccactgcttgctaaataaatccttagagttcagttgctcatttaaaaacttcctcctccccgctcctctcccaagccagccacttaacatttctgcctcaaaattacctcttgaatccattgggtcgcctcaagttcccaccaccacaagagtcgtggcagcttttaggtcctcatgcctgagttactgtgataatcccctgcttccgttcttaccctgctctcttcacgcactccaatataaagtccttctcctattaaactattcagtggtcacccatagcctccaggctgaaactccaagaccctccaagatagcgcagccggcaccgccccccttgcccctatcctgcagctgttctaaagtactgccccggcaggtccccgacaagcactgtgtgctcctacccctccgtgcctgcacatgctgctccccttgctggaaaatctgccagccttttccactgctttctaggctctgctatctggacgcctccccacagcactctacattgttataatttacttgtctctttcccctcatcagcctgtgatctacccaaaggcaggatctgagtgttgtatctccatttccccagcggccagcatagttcgggtacttcaaagccagatcggcccctaggggccctctccatggagaaacggtgggtctggcacctgagggtaggggtgtggccagaggcgggctcatgggagatgggcgtggtttgtgggcggggctctgctctacgccggaacctgggtctctagggcgtctgcgcaggaaggtgcgttgagatggcagttgccggagttggaggccgggcggcgacggtgagcaagaggctcccaaagtgggtgcccgagtagaagttatcgccttctccctcccaatattccttgaagagagactgtcccctctcagtatttccagtagctgtctatccttatactttcttgagacaactccccatattcgagtatactggttttccagacactcccacagaggacatatttgtcgagattatctaaggaaggggagctttatcccccatgtaactcctaaagggcacacatttttccagttatttcatgaagagatacccccaaagctccagcaattgcacattcttgttaactcagggagttttccacttttccagcactgtgcagattctcgaagaagtcataatccttgtcccatacttgatctgaagtggcacgtttgctatcattccctcccactctttggcataggatacctactctagagggaagartcaaactctggctggctacccatggcttcagcaagctttcagatttgaattagccgctaatttctgtaggctatatctaatcagaattagaacagaagtacctttaacaatggacttttaagaaagaaaaatcacatctttcagcgtaagttgtcgcngtcgtattcattgtgaatattcggactaactccctgaatgatcctcccaagcccagaagcagacaggcaaagttgaagaagcaacaaatagtggagatggtattgaagtagragtcagaagattgggcccagttctgctacattctagtcaggagatgacctttaacttctcagagcctcaataacttgaatctgttatctaggactaataactcctgccatgtctacctcagagggatcaaatgggctcatatatatgaaagcactttgaaaactatacattttctctaagtgtataggggattattataaatgatcctctgagttctaattaacttccaaggaatttgtcttgcttggtactaggttcaaatgcaacagatattttttgagcgcttactatgtgccaggtattcatctagacatgaggcctagcattgaaccaaaagagacaaaaaccccttmtaaatttaagaatgagtcgtcagcatattaagtgcctactcattacccagtgcagcgtcaaagcatggtgaagtagtaggaagaatctgtattctagatttaactctgccactatatagctgtgtgagaaagattttttccctgtgtgagcctgaacttcctcatctgtaaaataaggaagttaagcaaggtaacctctagttttctagtcttgactcatctgtactttaggggacctgaaagaaattgattaaaatacatatactttattggccttttctgagttgggttaagaatggagagaaaaataggaagcaaagaaggatatgtctgtatagcaaatcgtggggtttgataaagtataatttttccaagtattaaaaaatttgacttttatataaatacgaaattaataggtctccaatattttatttattaattaatgagggaaccagtaagatattaagatcagttcaaatgaaaaattaagagctaaatatttataggcaatttaataaaggaatgttaaaatacgatttctgaatgatatacaaaactaattaaggtcctaaagtgcaataagtcataaattttggagtcatcttttccaccagacataaaacatttttatcactactagatgaaaatctataagttaacctctgccctaacgagttataaaatagtccagtcaatagaaaactaatcaaagatataaacacaaaactgtactaaaagatcatccaataatttatttcacctgtttctaggtttcagatgacttttctgacaattgtagtcatcaacttcaacttagttgtcaggaaatgaaatctgtttcccaagctttgaaactataactttatgatgaagataaataaagtgaattccaaactaccatatgtgtcttagagatagatcattttggacttcagggatcaagttccaagtttcttaagaatgtgtttgaatgacacagtatcagcatgagaaattctcatattctgaatctttatttcctttatagaaattccatggaattatagttggtctactctgcaatgtctctatttaaaagcccaagtgaggacagacaagatgaacgtaggtaaactcaggaaaatgtatctgagtatgtcattattattacctctgaagtgtgtgtgtgtgtgtgtgtgtgtgtgtrtatacatgcacatatggcagatcaacctggcaatcagattgttaacctaccaaacaactgatcaggaaaggaaatatatttttcaaaagtaaatactttgtacttagaagtacaagctccactgttttatcatctgaaaatcctaatttgagtactctcttaacttttatatttggaaattcaccagtaaagcttgtgtacctttccttctctccccattcttcataactgcctcctgctaaaaagaggtgatcagtgtgaaaaaaggctgctgaggcagataaggtcctcctttgcagcctttttgtggacagaacaaatggatctgtctctgtagtaagggaggatttccataccatttctgtgctttcctttggtgaatcaagattctaaagggaggccgggcgtggtggctcacacctgtaatcccagcactgtgagagtccaaggccggcagatcacttgaggccaggagttcaagactagcttggccaacatggcaaaacctgtctctactaaaaataaaataaataaataaataaataaataaataaataaataaataaataaattagccaggcatggtgrcacatgcctatagtcccagctacttgggaggttgagggacaagaatcgcgtgagcctgggaggtggtggttgcagtgagccaagattgtgctattgcagtccaacctgggtgacagagggaaactctatcttaaaaaaaaaaaaaatcctaaagggagcaggaataatcacactccagccatctttcagaatggaactgcctgttatgtaagaacaacaacaacaaattatttctaatgtgaaattttgaaaaaggaagatttagatttaggcttccttttgaggaatggagaaagtgcagaatgaaatcagttcactgattgaaggtcacagtgtactttctttctttttttttttttttagtaacacggagtctcgctccgttgcccaggctggagtgcagtggcgcgatctgggctcactgcaagctccgcttcgcaggttcacgccattctcctgcctcagcctcccaagtagctgggactacaggtgcccgccaccacacctggctaattttttgtatttttttttagtagagacggggttccactgcgttagccagtatgttctccagctgacctcgtgatccacccgccttggcctcccaaagtgctgggattataggcgagtatactttctttacttgctgtcattgggcagttgtccgatttcatcctggaggaagcccatgtcaaggacactggccctggttccagaagtagaaagtcaggaaacttccatccaaaggaaaaccagggagtcctctgctaccctcaggagagctaaagggctaaaggacccagaagataatcaactgctctgcatattcttatgaacagaaaatatggagagccagaatactttagggtgtggtaagttccaggcaaatgaaaaatgtaataatcatcaataaagactgatcaattcattcgacaaatatttattgattattaaataagtgcgagccactgtgctaggtatggcaatacaatggcaacaaaactagacagaatttctgctcttagcgagattatggtttagcgaggggaaacattaattaacagcatatttaatagcaccaataaatataaaatatctgccataaatgcagtgaaataaataccatatgggaagtatagtagtcaagagcatgaattctggagtcataccgtctaggtttgaatcctagctccaccacttaccacgttatcttgggcaaatctcttaatttctctgctacagttcctcctctgtaaaatggggataataataaaagtgctgccacataaggttgctgtaaggattaaattaggtaatatttataaagcatttaggacagtatctgccacatgataaacactggtaaatgtgtaaaaaataatcaaaataatctataagagcttgacactttcaatcagaaagataattaagaacttcatctataaatgtgtgttatttcaaaagccaaaccttttaccaaggaaaaagagttgaaaccagttttcctggtaaatccctacaggtaggctaggactacctattgcaggtagatttactgcttctgctattttgagcagtaagcaattaatactggtttacccaagattttggcctattccactgaatttacaaaacgacagtgctaaacccaatcatttggcaggtaacactattttgaatattcagaatcttcaggcctattctggttggaaaatctacagtacataaatactggccagttctaacatcttggttgtctaccctctcctttctattttcttttctttttctttctttcttttttttttttttttgacagagtcttgctctgttgcccaggctggagtgcagtggcacgatctcagctcacagcaacctccacctcctggttcaagtgattctcatgcctcagcctcccaagaagctgggattacaggcatgcaccaccatgcccagctaattttcgtatttttagtagagacggggtttcgccatattggccaggccggtcttgaactcctgacctcaaatggtccactcgccttggcctcccaaagttctgggattacaagcgtgagccaccatgccgggcctctcctttctattttctaccacttcttagttcagcctttcatcattttaagtgttgactattatagccgtcttttaagtggtctttctgtctgcactccgttcccctgtaaatctatcatattaatgtttctgaacttccagtttatcacattttcccctactcaaaatctttgtaggattctctgagataaagtttaatatcattatcctaatattaaagtcctgacttgaagttcttgttttctgcctccttcagattttcgtacttactgtactatcatacaacttgtctagtctcaatgccaaccctttcattaagtcctttttcctgcctacagaactgtcccctgcatctctacctaattaacctgtgttcgtctcttgagtttagtgcaagtccttctccatgaagctctttccaacaattctgccctgcccccctttatctctccttcttgaattcctgtagtgcttgggttctacagtgtttgtttgtttgagacagagtttcactctgttgcccaggctggagtgaagtggtgtgaccttggctcattgcaacttgaggctcattggttgagcctcctgggctcaagtgatcctcccacctcagcctcccaactagctggggctaaaggcacatgccaccacacccagctaatttttgtacttttttatagagatgggatctcactatgttgcccaggctggtctcaaacttctgggctcaagtgatccacccacttgagtgggaggccactcaagtggcctcccaaagtgctgggattacaggtgtgagccaccatgcctggcccagttttttaaaataatagccttattgagatacaattaacatgtcacaaaatacacccttttaaagcatgtaattcagtgatttttaatatattcagagttttgaaaccatgaccataacttaattgtagaacattgtcatcatcccagaaagaaaccctatacccgttagcattcactctcagttctttcctctgctctcctataccctggcaaccactaatggatttttctggacttgacatataaatagaatcatataaaatgtggccttttgttactagcttccttcacttatgttttcaaggcccatccttattgtagtatgtatcctttttatggcggaatactattccagtgtttggatataccacaatttgcttatctcttcatcaggtgatagacatttgaattgtttccatttttttgggtattatgagtaatgttgcggtaaacatgtgtaaaagtttttgtgtggacatacaattttaattatcttgggtctctacaattcatttaacatcttatgtacaccctgccttgacatgctttgctgttttacatctatgttgtgtgattccattagattgtctgcctagcatagtgccttcagagttctctctgtcctagagagtttgcaagactgtcccattattatatttctcctttccctttcctttaccttccacacacttctgtaaataccatcttcatcaccaccaccaccaccacaagacaacaataaaaattatcaacagttatcaaaaggtagcttaataatactaggtagtaattcaaaaggttggagtaaatctatacatattgacaagggaagatgaccaatacatagtgtaaaaagaaaaaggtaacttgcagagcaatacatgtagtaggatctcattaaaaatatatatagagagagatgtgtatatatacataaatatttgtgtataaattccttgaaatggaagggacctaaaggatatacaccaatctatttatagtggtttccttaggaaaagaaggagtggaaggcacaggaaaggaaactttaaattttttctgtatatatttttgtttttgaatcttttacagtggaaatgtatttttatattactttgggtaattcttaaaattaataaaaagaaaaaagtgtaatcacaaatggaaaataactaagttggagaaactaaaaagaaaggacagaaaaggaaaaaaagaaaaaggactctaggaaggaagagggcatagatattgtggcatgtagacaggaaagttaatcagagtcttagtaacagaatactctacaaaagagcattaaataaacacaaaagtagacatttaggttgcacaactctgtgaacatactaaaaaccactaatttttatactttcaataggtgaattgtatggtttataaattttacctcataaagttgtttagaaaagacagatcaaaagttcccagtggccgggtacggtggctcacacctgtaatcccagcactttgggaagacaaggtgggcagatcacttgagatcaggagttcaagaccagcctggccaacatggtgaaaccccgtctctagtaagaatacaaaaattagccaggcatggtggcgcgtgcttgtaatctcagcttctcgggaggctgaggcaggagaatcgcttgaacccaggaggcagaggttgcagtgagccgagatcatgccactgcataaacaaataactttttagtatgtgtgtcccatctgatatttgggacatacttatcttgtatctgaatgttttatttgstaaatctggcaaccctaaacagaaggggttaaggtttgaatcctttagatttaaattgcttttttagcatcaccaaggcattttgtttctaactgacggcttttcatataactcccaaaccctcgtctgctatcccagggaaggttttatgatggagaagcactgaaagtaatgtctagcagttcagtcatacaagcctgattttacctttactgcattgatgagaaatcattggtcccagattccaaatgtggtcagagtacgaaagcacaactcccaatttccatccgcctggatgttcctgtcagcttctgccctacagaaagggagaagccaaaggtctgtaaagggagtagggaatagggcctttggtttttgagcatgtcctaaattgtgccagccaaaccaaccttctatggacccttgttaataaattggacagcttttatgattattttgattttctttaggctcytttgaacaattttagacttgtttttgcttaactcagacagaaaaattaatgaagctttaggggatggtcagacttagaggtgcaggagatcagtagtagctcaggagctggacttttcatgacattccagactttagtgagcttcttctcaaagctcttcttaacactgcattctacacaccctctacagccatgctgaatatcctctggtttgctgacttttgcatagaagtgtcaacaaaccattagccttagctgaggctcctctttgagtccagctgttctgtgattatatagatcttcccataaggaggaggcgattgtcctctactggaggagtttggacagcaatctgaccccaattgagcagaacatgtttytaagcatttttcacttgtgtacttgttcattcaacaaatytttattatatccagagcctaatgctgagccaagcggtaggctacagagatttaaagaaaagaaaaaacatggtctctaccttttttaaataaattgacatgaaattgtacgtatttattgtgtacaatatgatgttttgaaatatmtacataccttctagaatggttatatcaagctaattaacatatgcagtacctcacatagtatctctgcagggaaggcttatggcctgggcaatttttagttctgagcaagatggcctggaccttagcttgctgctgctagtagattactgggagtgtcagatctgtcttgtcatgttaatgagagctgggtgggacttactgccacctgctactcttactccttgtgcgaactcttctgtacagtagaaacagctatgcttctccttggaataatatcccagtggccagagaactgtcccttgagctccacaggggccgctgcttgccgtgcatgtggagagccagagcacagacctggcttatccagcctccacctggctttgcccctccacccgccctggtagcttaacacaaaggacagaaactttggggagctttatgaccctatccattgcctgagaaaccagaataccttccctggagatataaggcaagcacaaatcccaccactactaccacagctggtgttcttttccaagtgccaccttgtggctagaggccaacacagtccattacagcacctccaggtagaataacactgcacccgggaaggaagaaacttgtgcctgacctcagctatcaccattgtctgcaccacactagccgaccaggaggtcctgagtctgttcgtgtgaccaggtcattacttactaccactggcatttgagaaagccaacacactaaggctagctataaccaaggaatctcacagagtctatgtcactcccctgcaaaccccatcagagccagtgctagtacctgcttctgggaaacttgagaacacatcatatcactggatcccttgcagacattccctagtaccagcctggagtgtggcagcccctctaggtggctagatccagaagagcaacagaattcacagtagtctggctctcagggactcctacttctaggggaaaggggagtatactacgtcaagggaataccccatgggacaaaggactctagatggcaggccctgagtcccagatctttctgctggtggaagtttctttcagcaggggcacagttgcagtgctggacttagcagggaaagtctgcagctctactccaacagccgggcaccaagcctgcggcttgtgaagaatctcagagagggggacttcttttccccctcatccaccattgcagacacagctggggcttctcccatgggagcttggtgtgagtgcatctatgcatagcatttctggaacacttcaaggtgactgtatccccataggaggagcactctccaggttcaggcttgcacaagaggtagagtcacaattcttccttacttggaacatcaacattcctgcagatgaaaagaggtacctgtctgatctgaatagctagaacacagtcaggagtgtgtcctgctggcctggcaggggagctgaggtggctcccacccttctgcctgataaaacctcagtgtttctcactgagagctcccccagccacctctgacaaacttgggacctctgcccaccattgggtactgcatttacccacctgcttcagccacaactggtttctacacagggatacctcctctgctggcctgaagcccagactgttcaaccagtaaataaaatactagggaaaaataagtaaacaaaaaggtgtataccacaggggaatgaaataagtaagcttcaagagaactctgctgttccaaccccctgtgagacagtaaacttgcgcacatactgtgcacattgttactacaaactagcatctgagaaggccatcatacaaagactgccagtaaccaaggaacttacgtagaatcttcacccctgaaagcaccaagagccgaattaggctacagtaaacattaaagtcagatccttaagagggtaaaaagaaatttttaaaaaacacaatcaaaataattctataataactagaagaaatggtctacccaaaagagaaggaaccagaaaaataattctggtaacatggcaaaacagggttctgtagcacccccaaaagatcacattagctctccagtgatggatccaaacaaagatgaatttttttttttcttttgtgatggggtctccctctgtcacccaagctagagtgcagtggtgtgatcttggctcactgcaacctccgcctcctgggttcaagcgattctcctgcctcagcctccccaagtagctgggactacaggtgtgtgccaccactcccagctatttttgtgtgtgtatttttagtagagacaaggtttcaccatgttggccaggctggtctcgaactcttgacctcaggtgatccacccgccttggcctcccaaagtgctgggattacaggtgtgagccaccacacccagccaagatgaaatatttgaaataccagataaagaattcgaatggttgattattaagctttgattatttccttgagtacaaggagataccagagaaaggtgaaagccaacacaaagaaattaaaaaaaaaaaattcaggatatgaatgaaaaattttctaaagagatagagatcttgaagaatagctaatcagaacttccataaatgaaagacacatttagggaattacaaaatgcaatggaaagatttaaaaatagactagaacaaccagaagaaagaatttcagagcttgaagacaaggctttcaaattaacccaatcagaaaaaataaaaaagaataaaaataaatgaacaaagtctccaaaaatatggaattaagtaaaatggccaaacctaataataattgatgttcctgaaggagaagaaaaagcaaaaagtttggaaaacttatttgaaggaataaatgaggaaaacttctctgaccttgctagagatttagatatccaaatacaagaagcgtaaagaaatcctgggagattccttgcaaaaaggacattaccaagcatatagtcatcaggctatctaaagtcgatgtgaaggaaagaattctaagagcagtgagacaaaaccatcagttaacctgtaaaggaaaacccatcagactaacagaagacttctcagcagaaaccttacaagccagaagggattggggtcctatctttagcctccttaaacagagtaactgtcagccaagaattttgtatctagcaaaattaagtttcataaatgaaggagaaataaagtcattttcagacaaatgatgagggaatttgtcactaccataccagccctacaagaaattctaaaaagagttctaaatcttgaaacaaaagcttgataggcagcaaaataggacctctggaaagcataaaactaacaaaacctatgaaacaataacacaatgaaaaatacaaagtatctagataacaacatgatgaatggaacagtacctcacctctcaatattaatgtcacatataaattgcttaaatgctccacttaaatgatacagattggcagaatggattaaaaaaatcacaaaccaaatatctgctgtctgcaagagattcacctaacatgtaaggatttatataaactcaaggtaaaggggtagaaaaagatactccatgtaaatggaaaccaaaagcaagcaggagtggctattcttatctaaaataaaatagaccttaaagcaacaacagtgaaaaaaagacaaggtaattatacaatgatataaggctcaatccaacgagaaggtattacaatcctaaatttatatgcacctaacgctggagctcccaggttcgtaaaacagttaccgctagacctactaaatgagatggatagcaacataataatagtggggaacttcagtattccactgacagtgctagagagatcatcaagacaaagtcaacaacaacaaaaaaaattgactttaaatgacactctcaaacaaatggacctaacagatatttacagaacgttctatccaagatatgcacaatatacattcttctcatcaatacatttaacattctccaagatagaccatatgataggccacaaaacaagtcttaataaatttataaacatcaaaattatatcaagtattttctcagaccacagtggaataaaagtagaaattaactgcaaaagaaaccctcaaaactatacaaatacatggaaattaaacaatctgctcctgaattatttttgagttaacaatgaaatcaagatggaaatttaaaaattcttttaaatgaatgacagtagtgacacagattattaaaacctcttgagatacagcaaaaaaaaaagtgctaatgggaacgtttatagtgctaaatgcctgcatcaaaaagtcggaaagatcacaagttgacaatctaatatcacacctcaaggaactagagaaacaagaacaaactaaacccaaagctagcataagaaaagaaataataaaaatcagagcagaactaaatgaaattgaaacaaaaaaatgcaagagataaatgaaaaaaagctggttctctgaaaagataaaattgatagactattagctagattaaccaagaaaaaagaaaattcaaataaattcaattagaaataaaactggagatattacagttgacaccacagaaacataaaagatcattcgagactactaacaacacctctatgcacacaaactagaaaatctagaggaaatggataaattcctggaaacatacaactctcctagattaagtygggaagaaataggtcccctgaacagactaataacaagcagtgagattgaatgagtaatttttaaaaattgctagcaataaaaaagcccagggccagatggattctaatgtgaattctaccaggcattaagagaagaattggtaccatttctactgaaatatttcaaaagattgagaaagaagtaatcctccctaaaacattctatgaagccagtatcaccctgataccaaaaccaggaaagaacattaaaaaaaaagaaaactacagaccaatatccctgataaacatagatgcaaaaatcatcaacaaaatactagctaaccaaatcgaacagcacatcagaaagatcaagtgggttgatcaaacctactataatcaagtgggtttcatcccagggatgcagggatggtctaacatctatggaagtcaataatcatgacacatcacataaacagaattaaaaacatatgattggctgggcatggtggctcacgcctgtaatataacactttgggaggccaaggtgggtggatcatgaggtcaggagttcaaggccagcctggccaacatagtgaaatcccatctctactaaaaatacaaaaattagccgggcatggtggcatgcacctgtagtcccagctactcaggaggctgaggcaggagaatcgcttgaacccgggaggcggaggttgtggtgagccacgattgtgccactgcactccagactggcaacagagcaagactccgtctcaaaaaaaaaaaaaaaaagtatgatcatctcaatagatgcagaaaaagcatttgataaaatccagcatctctttgtgataaagactctcaataaactaggtacagaaggggacatgcctcaaaataataaaagccacatataacaaacccatagtcaacatcatactgaaagggaaaagttgaaagtattccccctgagaactggaacaagacaaggatgcccactttcaccatttctattcaacatagtccattaggaagtcctagccagagcaatcaggcaagagaaagaaataacaggcatctcagttggaaagaggacatcaaactatctccattcactggtgatgtggtcatatacctagaagaccctgaagactcctccagaagactcctagatttaataaacgaattttgaaaagtctcaagttacaaaatcggtgtacacaaatcagtagcactactatacaccaacaaccaccaagctaagaatcgcatcaagaacactcaatcccttttaaaacagctgcaaaaaatataaaatacctaggaatatatttaactaaggaggtgaaagatctctacaaggagaactataaaacaatgctgaaagaaatcatagatgatacaaacaaatggaaacatatcccatgctcatggattaagaagaatcaatactgtgaaaatgaccacagtgcccaaagcaatctacagattcaatgcaagtcctatcaaaatgccagcataatttttcacaaaattaggaaaaacaattctataatttatatggaaccaaaaaagaccctgaatagccaaagcaatcataagtaaaaagaacaaacctggaagcatcacattaccagacttcaaattatactacaaggctatagttacgaaaacagcatagtactagtataaaagtaggaacgtagaccaatggaatggaatagagaacagagaaataaagccaaatacttacaaccaacggatctttgacaaagcatacaaaaacatgaactgtggaaatgacaccctatttaataaatggtgctgggaaaactggttagccacatgtagaagaatgaaactagatcccaatctctcactgtatacaaaagtcaactcaagatggatcaagacttaaatccagcacctaaaaccataaaaattctagaagataaccttggaaaaactctcttgaacataggccttggcaaagaattcatgactaaaaccccagaagtaaatgcaacaaaacaaataaatgggacctaattaaactaaaaagcttctgcacagcaaaagaaataatcatcagagtaaacagataacctacagaatggggggaaatatttgtaaaccctgcatccatcaaaggactaatatccagaatctaaaagaaactcaaacaaatcagcaagaaaaaaactaataatcccatcaaraagtgagcaaatgacatgaatagacatttctcaaaagaagatatacaaatgtccaacaaacatgaaaaaaatgctcagcattactaatcatcagggaaatgcaaattaaaactgcaatgatataccaccctgctcctacaagaatagccaaaaaagatattggtatggatatggtgaaaagagaaggatgtggttgtaagtatttggcttatacactgctggtgggaatgtaaattagtacaatctctatggaaaacagtatggagattccttaaagaactaaaaatagatcttccatttgattcagcagtcctactgctgggtatctactcaaaagaaaagaagtaattatgtgaaaaagacacatgcacacatttattgaagcacagttcacagtcgcaaagacacagaaccaacctaaatgcgcatcaaccaatgggtggataaagaaaatttcatatatatatacaccatggaatactactcagccataagaaggaatgaaataatgtcttttgcagcaacrtgggtggagctggaggacattattctaagtgaagtaactcaggaatggaagactagctactgttatgttctcacttataagtgagagctaagctatgagtacacaaaggcatacaaagtggtaaaatggactttggagactcagaagggggagggtgcaaatggagtgaggaataaaaaactacatattgggtwcggtgtacattgcttgggtgatgggtgcaccaaaatctcagaattcacaactatataatgcatccatgtaaccaaaatcacttgtacctcaaaagctactgaaatattttaatggtttttttaattaacatgaagttatatatatttattgcatacaacatgttttgaaatgcacacacacacacaaaaccccttccagaatggttaaattaagctaattaacatatacattacctcacatagttgtcatttttatggtgagagcacttaaaatctactctttgaatttttcaagaatacaatgtattgttatttattatagtcaccatgttgtacaatagatccctggaacttattcttcctatctaactgaaatttgtaacctttgatcaacatttccccaactcctccctcatcagcctcccagcccctggtaaccaccatactatccagccatgaaaaaagaggtaaatccgtcattttgtaacaacatggatgaatctggagaacattatgttaagtgaataaatcagacacagaaagacaaatactgcatgatctgactcatatgtggcatctaaaaaagctgatctcatggtctctacctataaggagctctttgtttagtgggagaatgctggtattgtaagtaagcatgataagtaagttaaatataaaccatgggatgtagctgtgggtagactgaaccagaaacacatgatgaaatggtggcgagaaagcaaattagttrctgccctttctgcagggccatggatactggccttttctgtgatgactctctgctacatcatttagctgttcttcttagcatacatttttttttaagagatggtgtcttgcttgttgcccaggctggtgttgaactcctgggctcaagcaatcctcccccttaagcctcccaaaatgctgggattacaggtgtaagccaccatgcctagtcattttaccattccttacatggaaatatctagtggttatgctccagatatctcagaaatgaagtctggagagatgaaaaataaattttcttgtgtattcaagactttaagccatatggttagctaaaatctactgatagctgtaatgttttagattgttatttgactaccataggataaattgtgatcatttggaatctgtgtgagaaattccagtattcttaatgcgaactgactctgtattagttcgttctcatgctgctataaggaaatacccaagactgggtaatttgtaaagaaaagaggtttaattgacacacagtttccacatgactggggaggcctcaggaaacttacaatcatggcagaagtcacctcttggcagggcagcaggagagagaatgagtgcaaacaggggaaatgccagagacttataaaatcagatctcatgagactcattcactatcatgagaacagcatgggggaaaccacccctgtgayccaattacctccacgtggtcccacccttgacacgtgaggattatgggattacaatttaagatgagattttgggtggggtcacagccaaaccataactgtctccaactaatctgacttgaaattagccctttatccttccccttgcagctgtcttcacttatttttagagacaggaaaaggagatttctatgacagccattaaatgacttggctgaaatcacctaggcctgctaatctggaactacagcaaggggtcattgctaaatttgccctgccagcacctgggcttaatggaactgtgagtatagtagtatatggagagtaagccttgactaatctagtagttaagagacttgcactccggaagatcatctcattgttcttgcattagctggaaaatcccatttgtgatcaattcaccattgtgagcaaggaaatatttgttcagaatctcctaagcctgattgccacctgactaactggccttcattccttttctgccctcctccttcttttcctggttacttaaatttcagcgtgctactttcttttgtttcatcttacagagctcattttccattttagtttstgccatttccttgctaggataatcgccaatcttctgtagctttaacccctaaaacccgaggtggtattacatatgttgcrtaagagctaagtctttcaccctggcatttgagtcaaaactctaagcattatatccttaaacagaggcttcttctattttgagacttctactacctttttaccaggtagacagaattctcctcactagactatggcttttgtacccttccttttccactacctggattagcctagtgcatccacagaaggtagctgaaagttcaaaatctattttgggcacagacaactatatcaatgatgcatatggaatctccttgacatattataagataaataacagaatataacatttaatgtgtactctttttttggttgttgttagaggcagggtctccctctgtcactcaggctgaagtgcagtggcatgatcaagctcactgcagcctccaactactgggctcaagcrattcttccaccttagcctcccatgtagctaggactacaggtgtgtggcaccatgccagctacattaaaaaaattttttttgtagagacagggtctcactaccttgaccaggctggtcttgaactcctggcctcaagtgagcctcccaccttggcctctcaatgtgttgggattacaggcatgagctattgcacccagcctaatgtgtacttttgtgtggttctcattttttatttgtttttcattcaccttttctcaggttgaaaatgtgtacttttgatttgtcaggaatcagataggcactttacatttatcatctcatttagccctattagtatatacagtaggttttactaccccattttacacatgaagaaactaaagccaagaaatgaaaagtgacttgccctaggtcacttaacaatttagttgcagagtccagtctagaatagctaaaatgtcctgagcatttttawttattaggaattgttttcaaatattttgtgtgccttaactcattaatcctcccaataaccttatgagtagatattattatcatttccatcttacagaaaaataaaatgaatctcaggttaagttactttcccaaggctaagaaatctggctttctagcccccaattcctcttctcctcctggtgaaaatcctattttcctttttccttctttctttgtggcaggtctgtcatcaaagaaccaaaacaaggtgaaggttaatcctgccctgactttggagtctcaatctgtctttgccaactcaggctctgaagtggaagactaagatttgaaccctgacagcctgactcaattgtctgtgttcttaaccactatgggagctttctatattttttaactttaagtctactgcacattttataacaccagcttgcctcacttcaccaagatgtctggcccttttagttcagttatttcaccatgcgcaggccagcttttaggacaggtcctttgaaaccagtctttgaataggctgtagattcaaccctcagttcctaatggagaatgaattttccacagtcaccagtggctagaagtaggtgtttgtccccttgagttccatagctaggacttcttcaactagactatttcctagactctccttgtctcaactaatttccaaccttctgtcattctaacctctcacccataattcacattttgtcattctcgtttcagccaaacaggaataacctttgaattaacaagtaatggggaaaacacttagtcacccagtcttctcttacagtatttacatgccccagggaatcttgaattaatctttattatccagtctgaaaactttcttcctgcctttatgatctcaaacaagactggttactttctttccttacagcctgccttttttctctctcaaacatttagtttattctcttagatggttgtgcaaagtgatgttttaaccacttttctcatcattccttcttttccttcatcgtagacctcttaggaaatctggctttctagcccccaattcctcttctcctggtgaaaatcctactttcctttctccttcttctttcttcatggcaggtctgtcattaaagagccagaacaaggtgaaggttaatcctgcccctacttcggagtctcaatctgtctttagcaactcaggctctgaaccttgagatctactgctttactttactcttcaactcaaagagggagatatgtgttcagtattcagttgttgcatagaggctgaaccccaggtatccctcagaactagtgagagaatggcctgtttcacccagataagttgctggcagaggctgttagacccttgttaggttaaaaaataatcagggatatttaggattaaatttaataagaaatgtgaaatccagtaagaaaatattataactttatcaaaagttataaaataatatttttaaacaaatagaaacgttttactggtctgaagggataaatggcatgggagaaactgattttattcagtaatccattaatatattgagtatgaacatagcctgtccaaggactggagaatctcaacactagtagaaacaccagtacttctctggtaccctgccttaatcaggtagctatctgtgccccttgagaaagtccctgcacaaagggcctatgccatacaccagctctaaatcctagatgtgactaaattatctgagctatgcatattccactgcttcagagaagctaagcttcaatgattagcagaagcccttgtatcacacagttgtaaataagccactaaccagtcaaaataaagctccacaaaatatatcaatcccatctcacataagtataaaacttctcccatgtttattcaactagtaatcatccagtaaccattcatcctaataatcacaagaataaaatataagaaggaagaaatgtactagtacagtagaacaaactacaagctgcatagctgggttgtaagcatagtccagagaagactcatagccatttgcttatgtattgctggtaagctgactatatagacatgatcatcatgcacaaaggagtggcgtcccaggaggacaccaacagctatctctctgtctctctcacaggaatatagcatgttaccagatagggggctaatattgcaaaaatgtcaactctatccaaattagtgtacataatctaaatctgtttactctcaaatccttgggtaaacctagctgaacatcccagtttcatcttggtcacaatttgtacaaatggtaaccacaaagaaaaagcctctagtagatacagaaaagagaaagataggaatcaaagcacaccactacaaaagtcatcagatcacaaaggaagacagcaagagaggaacaaaggaactacaaaacactcagaaaacaacaaaatggcaatagtaaatacctatcttaaattactttaaatgtaaatagattgaattctcccatcaaaagactgactagaatggttgaatgaaaaaacaaaacaaaacaaaaaaataagatctaacaatatgctacccacaagagagtcactttaactttaaggacatacataggctgaaagtgaagggatgtaaaaagatactccatgcaaatggtaaccaaaagagggcaagggtggctatgcttatgtcagaaaaatctgtcataaaagacagaaaggtcattatttaatgataaaggggccaattcataaataggatataacactagtgaatataaatgcatccaacaacagagcacttaaatgtataaggccaaaggaagacagcaagagaggatcaaacgaactacaaaacactcagaaaacaattaacaaaatggcaatgctaaatacttacctatctataattactttaagtgtataaggcaaagataaacagaactgaagggagaaatagacagcagtacagtaaagtagagaacctcaataatccactttcaacagtagaatcattcagaaagagaatcaaggaaacagtggacttgawtaacactatgaacaaatggacctaacagatatatacagaacattccattcccaaacagcagaatatattgttcttttcaagtgcacatggatctgttctccagtataaatcatattttgggccacaaaacacgtcttaacaaatgtaaaaagattgaaagtatattaagtatctttcctaactacatggtatgaaactagaataacaaccaatggatgaaaaaaaaatccaaaaggtgaaataaaaatacctttatacaagtggaaacataacaaaacttatgggatgcagcaaaagttgttctaagagaaaagtttattgcaataaatgcctacattaaggaaaaaaaaagaaagatctcaattaaacaacctacttttataccttaaggaactaggaaaagaacaaattaagcccaaagttagcagaaggaaggagttagagtaaaaataaataaaatggagaatagaaaaacaagaaaaaataatgaaactaagaattggtttattgaaaagataaacacaattgacaaacccttaggtaaacttttatttttaaaagactctaaaatccaaaatgaaagagaaaatgtacaactgatgccacaaaaataaaagggatcacaagagactattataaagttatatgccaacaaattgaataacctagaagaaatggataaattcctggagacatgcaacctaccaagcctgattaacaaagaaaaaatctgaacagactaataagtaaggagatcgaattagtaatcaaaaacctcccagcaggccgggtgcggtggcccatgcctgtaatcccagcactttgggaggtcgaggcaggcagatcacttgaggtcagcaatttgagaccagcctggccaacatggcaaaaccccatctctactaaaatacaaaaattagccgggcgtggtaacaggcgcctgtaatcccagcttcttgggaggctgaggcaggagaatttattgaaccagggagcttgcagtgagctgagatcatgccactgcactgcagcctgggtgacagagtgagactctgtctcaaaacaaaaactaaaacaaaaccaaccaacaaagaaaagcccaggaccagatggcttcacaggttaattctatcaaacatttaaaaaataattaacactagtccttcttaaactcttcctaaaattgaaaaagagagaacactttcaactcattttatcatgccagcattactctgataccaaagccagacaaagacactacaagaaaagaaaattattggccaatacttctgatagatgcaaaaatcctcaacaaaatcctagcaaataaattcagtatcacagtaaaagaatcatatgtcatgaccaagtaggtcttatctctaggatgcagagatcacttaacatatgcaaattaatcaatgtgatataccacattaacagagtgaagggtaaaaactgcattaactcagtagatacagaaaatgcatatggtcagttgatttttaacaaggacgttaaaactattcattgggaaacgaatagtcttcaataaatggtgctggtagaactggatatacacaatacaaaaatataaaaataaaaacggacccctatttcaccatatgcaagaattaatgcaaaatagatcaaagacttaaatgtaagagctaaaactataaaactctttttaattttatttatttatttatttttggagacagagtcttgctctgctgccccgactggagtgtggtggtgcaatcatggctcattggccagcctcaatcctggcctcaaatgatcatcccacctcagcctcctgaatagctaggatcacaggctgcaccatcatgcctaattttagtttttatagagatggggtctcactatgttgcccagattggtcttgaactcctgggctcaagcaatcctcctgcctcaacctcccaaagtgctgggattacaggtgtgagccactgcgtctgggctataaaagtcttagaaaaagaaataggagtaaattctaatgaccttggattagcaatggtttctaaaccatgacacgaaaaacacaagtgaccaaagaaaatgcatataggacttcatcaaaataaaaaactttgttgcttcaaagccaaccatcaagaaaatgaaaagacaactcagaatggtacaaaatatttgcaagtcatatatttgataagggccttctatccagaatatataaagaactcttacagttcagtgataaagagacaacgcaatttaaaaatggtcaaagacattaacaggggaacagtagacactgtggactactagagggggaggggttgtgggtgcaatatacctatgccacaaaactgcacatgcacccctgtctgtaaaacagaagttgaaatttttttaaaatggtcaaataatctgagtagacatttcttcaaaaaaaaaatgcaaataactagtaagcacatgaaaagatactcaacatcatcattagtcattagggaaatgctaatcgaaaccacagtgagatactatttcacagcctttaaaattgctaaagtaaaaagcatgagcaataacaagtgctggagacaatgtggagaaattgggacactcatacattgtgaggagggaatgtagaatagtacagatactgtggaaaactgtttagcagttgctcaaaaaattaaacataaagttaccatttgacctattgattctactcctaggtgtatactcaagaggaatgaaaacatgtttacacaaaaacttgtacagggatgttcatagccatattcttcacagtagccaaaaggtggaaacaaaccaaatgcccaatcatggatgaatagataagtaaaatgtggtacatccaaacattgacatattgttcagatgtaaaaaggaatgaaatactgatacgtactacaacgtgaatgaaccttggaaacattattctaagtgaaagaaaccagttttaaaagaccacatattttatgcttctgtttatgtaaaatgtccagaatagacaaatccacagagaatagattagtgtccaccagggactgagaggagaggtcagaattgagagtacaggtatgaggtgtctttggggggtgatgaatatgttctggaattaatgacgatggttgcataaccatgaatatactaaaagccattcaattgtacacttccagggggtgaattttatattatatgaatcatagctcaaaaaaaaaaaaaaaacttgaacaattgcagagttgggtttctaggacctggagccagagactcctcttggaggagtgaatcaagtagttcaagatcagagtaggagtcggtagcctaggatagaatttttgagggccaaggaaagaagtttctttttaatcttgggagccatgggccaaggaggaccttagagggccagaagagctttaaagtagatattcaatacaactcagaggcagaggggttgctacgacccactctctgagggggcaaattctatggagacattacctaagaattactagaagcattaagggcagaaagcttaggagcactgtcagccttcaggctaaattctatattgcttggtataatacacaggcttaagagaactgggaagcacttaatccatatcatccaaataactaaggcatctcctccaggaatacatctatgtcctactttccttgacttccatcccctcttctgtgcacctccaacctgtagctctgcccttacattagattgaaattttattttatatttgtctgtcctactaggaatagtaccaagatggtcaggatgatgttttcctcatctcgtaaccctaggacctagcacagggcctgaacctgccaagaacccagcaaatgcttgctgaaccaaggaagaaccaaagagactataggaatgtttcattcaggggagaaagatctattgattatatatatatataatttgtttgttcataacatggtaacaggctcactatttgtagtagtttgtaacaaacacctctgttttgatgtgatgattttgtcaagtagttatcaggcttactcctactatactaaagtccttgaagtcagagactgtcttactcatcgttttatccctccacggcatccagtacactggcctctgtgcaatagatgctcagtcattgtttattaatttaaatttagttaagcaagtttaggacaagttggcttagaaaagagtctcagatatattaagacaaagtgctaaaattgacttatgagggaaggctgggtttctgtgtttgtcagtaaaattggtgcagaccatcttgttgtctgtggagacatgatctaggaagtactagaagcattgatggtggagaactcctcaggagttacttgtcctgttgcctccagaaagcttgaatacttgagcatttttatttttattatatttcttgattcttttgattaaagagacaaaatcccatgcttaaatagacatcttcagcaagaaagtgtggggatctagtgaagtcttcactagcagccaacatcccagtctgatatacacaggggcatccatctcatcgtttatcctatcttttttcagaacatgagagatatctgcaagccaacaacaaagaattcaacagtatttttggatatccggtgagtgtcatccctctggctgtttcagaagggggtcagtattctcctataatattcttctttgttgggggagcgtgaaattctttgtagttgtggatcctataacacagattctattacactttctttcaagctcctatacaatgcaatgaaggctcagaagccaaaattaatctagtgacataagctagggagagaatgtcttagatttcaggtttatatataactcccagaaaataaatactgtagtttttcttgcacaaatgaaagcatagttctacttttttcacttagacatgtatctgacaacacatacagatatccctcatttatttaatagcgacattgttttccattatattgataaacctgaatttatttagtcagtcttctattgatgaacatttaaatgtctccagtgttttgctatgctaaatggtgctgaatgaacaccactatacatatattttggcacatttgtgtgactgtatcttatgaaagtttcctaaaagtaaattgtctgtttcaaaagaaaaacacactaaaaattaaaaattatcagaggccagattgccccccaaaagaattatatccatttatgtttctacttagagactgcccgtttctccacattcctgtcaaactcattattatcaatctttgtcatctttgccagctcttagatgaaaatgacatacatgttaattagccttttgtatttctttttctggaaaatacctattaatgatctttgcccacttcctattgaattgttcatttttcacttatttatgtgtctataactaagtaattcatgaaaagatatatattgaaaaggcatgctccaatactccatccttgtccatatctgctcccctgagggaaccactgttagttttcttgtgtgtattaatcagattagtgtttctttgtgcaaataaagcaaatacaaatatatagtcttattttcctatttttacactattctgaaccttaacagtatatcctggagatgttttcatcatcataatttcataatagtttttttcttttttttcctttttcagctataatatatagtatttcctctgcagatttaacatattttatttaaccagttccttttaaatggacatttgggttgttttcaatcttctatgatcacaagcaatggttttatacataatataattccatgcatgtgtagcataatataattccatgcatgtgtagctatgtatacatatacatagctataattatataaaaatatatgtctgcggtctctgtgggatattagtttatgatttctgagtgagagtggtatattagtccaatctcacactgctataaataactacctgagactgggtaatttatgaagaaaagaggtttaattgactcacagttcctcaggcataactggaagcatgactgggacgccgcaggaaacttacaatcctggcagaaggcaaaggggaagcaagcacctttttcacgtggtggcaggaaagagagagagagtgaggaggatcctatacttttaaatcatcagatcttgtgagaacacaagaatagcatgagggaaagccgcctccatgattcagtcacctccyaccaggtccctccccaacactgggagttacaattcaacatggtatttgggtgggggacacagagccaaaccatatcaaatagttctggataataatagtatccaagatatgaccatgaaagcaggtttttctcttctctatcttctagacctacgtaacaagcagtggggacagtaaatctaggtttgggcatcagacagatctgagtttgaatatagctcagcctttactaaccttaatgtcttaggcaagtttgttaacttctctgatcttcagttctttcatctgtaaaatgggcataataatgttcaccttgcatggtggtcgtaggagttaagtatggttctgaaaatgttagttctgtttctccaaaaaactattagcccttggaaaaagggyatctcatttatctctgtatacacagtatatttgtgatacagtttctatcacaatgttgtgcacacagccaacattcaataaatatatattgaatattgaatgagtgaatgaacagatctgactgattctgatatatttaacaccatttcatttccctggccctgagcattgctcattttcctatttctctaacttcttccactgtgactccttgtcatcttcctaactcctaactactgattctcattatatccttggccttttattctcttctattttcccaattaaccttcagtcccatatcactgcccaaagaaaaaaataaccaaaccaaaattaaccacctcttatcatgtttaaattttatcacctctgccaaaaggactaaactctgaggaacttcatagttaaggagatgttattaggatattgcttctggttttacatttaagagcaaaatgaaacgctctagttgccaagttaataaataaatacctgtacttctatcttgaggcagaatgctacctacgtgagtagaaacctgaaatatattaaatggctataaaatcaaatggaaaatcaacagtgaaggctagctacatcagtaaggccacctctcagaagatctttgggtccaagtatcacagccatctggacttaaacactgagaaattcaaagtatcttatgatcaaagaaagctatttccatgttagaattacatactctcatgatgagaagggcctgtagagatcattttactagaacttcgttcaagacagaccatgagcttctccagaagggatcctgtctaattatttttcagcctccactagtatagtccagcataaggctgtgaaaagagcaagccttgagaaatgctatastgtctgattgattattatttggaaaatcatggagagaacaccaaggaaatcttagttttggcttggatctctaaactcctaagtgctaagctatttgaccagcttctcatccctaaggaaataggtaggttcttcttttaaaaaaaacaaaacaaacaaacttgtatttaagttcaggggcacatgtgcaggatgtgcaggtttgttacataggtaagcctgtgtcatggggattttttgtacagattatttaatcacccaggtattaagcctagtatccattagttatttttattcttttgttctgtccttttaaatggaagaggtaggagatgagccctgaacttagggaattatttggtcttattctcctgcttttagagctcttagatttgagctctgacatcttaggacaaatgatttaagactccaaggtagaaagtaagatggtcctgtgaacatcttgagatcagaattgaggaagtagacaagttcccattttcactgagcaaaatagtagcttagatataagccaaaactctttaaatcctcttaggacaattaagggccaaatgattctccaatgctgatagtgacccctatagaaaccttcagtgggctaggattgaaagacagttttttgcttttagcatctgacgtccttcaacattgcaaaaaacacagaaaggcacaccaaactgagtttgctcagctaagaaaagctttgttagagagctctggatgcagtacctcaatttcctcatcctcaaaagtacccccttcataggattgttgtgaggagtaaatgagttgctacatataaaatgctagaacagtgcctttcacgaagtaagtactcaataaatgtaagtttttattgctgttgatttgattatcattattactatcaataacatcaataagcaagaactctatcagggcagagatacattcccccaagtacccaacagtcttgccatctttctaccttctaggcctctctaggggtagactgggaagtaggcgcagctgcttatcaacccagttttgagctgtcttttgtctaattgtgtatttcttgtttatttgtttgtttactcacagaacaatgccatcaagacctcaaaatatagtgtctttaatttcctgcccctgaacctatttgaacagttccagagacttgcaaatgcatatttcctcattttgctatttttacaggtattgcttttgggggcctttttcacagagtattttataaacctctctggggtcaggctgtgtaatcagtttttctcctccctaaattgggaaatgtcttctctctttagacaacaggaacgtggatggctggagtctcagaccagtcccttagaatagctgtggtcaggattagctagtgtatagcaagcctctacacaaggaaagggacaaggtcaccacatcccaaggaaggggagctcctcatcatggctgtattgccacagttcagtttgaccatagggggctacagaattcttcaccccaaccacaactccaactctattcctccttcttgtcccagcctccttgacataaaattaacatatgggagtgctaaagaaggtttagaatggtttagaatatgagtgccagcataagaacaggaagcagggcagggtaggcccaaattgggagacagggacaggtcatctcactcctccttgtactgaagggtgtgggagagcatgtagtttttctgtatctacttttacccactctccatacccattacttttcactgtcaaaggagaaatgggtctttgccatcaacacaaaggtagtggggttcaggatagataggtagcaacttatagccttttattcttttatcctcccttgggaaatgtttacttatatttggggggttatatgaaagatacaacagtggaaagcaactaggatagttggatttagtatgaacaaatggaggtgaaaatgatgttgagggtgagggatgtggtgggggggaatgtattatcctttcagttttctgacccaagatcctctccctttccctctcttagttgattccccagatctcctccttgacatggtatacaactataacacccctgatggtggtgctgtccattaacagctgtgaaagatgccatcgatgacctggtgaagtagcttcctgggcctctacttcctcactgcacctagtcagactgtgggcatgaaggacttcccagaactacctagtgctaacaagaaaccctgaatggaaagagatatttcctttcttctttccttattcatcccagagtaatatgcagtacctttaggcccaagattggtggtctgtgtatggccagaaaggggcaaaacaaggcctttctctatcttcctactgccaccacttttagcccctctcctgagcctccttccatctttaataacccactctttctttactcctctcttagctttttctagctttgttctcatcctttttcctctgctcctccttctcctactctatattccctttgccttcytctatctgcccctgctccatctctcctattctttctctttcttctctccacatttcctgtctcctctcgaactctattttcctttccaactttcaattctgttaagtgtgcacagctaggaaccctctgtcctggctttgaaagagaaactggctcacagtgagtgctgcatggcttcctctttgcctcttacagcaggcccagcatagaggggtgagagtaaggacccagtaccatgcctactagtaggatttggaaagccagtcctatagacctgcttgcagtttccctaagagggtctttctgattttgccagaatagatttttagcctagtttgagagcaccttgtttcctcagcactttatctctataaacccaggattagcatgttgtggtttacctttcagtcacaacttagatgtacgaaaatataactttatttctctataactgaactcagtttagcttataaccacatgcataccccatcttaactctctccagtgagaaccaaaaattaatttaccaattcatggtaacccaattacttctggcttagaattcagtctctttatgataaatatttggacaattttgaattctgacaaattcaggattctctctgccccactcccagtcctaccctttactcagggagtaatctcaactggaaggaagatatttatgtgaatcctggcatcaggacatagcctctatttgtttcccttctatttgatctttaaatattggcctctttcctcagccactatagaagcttctgtatgtcaaccatggttggaggtagggtaggagtctgcttgagaatactcagctttcccagcacctacccaggcagacagaattctgtagccctgcccatcatttggattgtgtcctctgcagcttttgatatgttattctcattcctccaggttttttgcttttgatatttaaaactaaaattttgtctctttcttctccctggattcttttcctgccctctcttcccagcttcccagagataatcaacctcttggcctagtttgaaggaaagaagggcttgggacaggggaaaaggagaattacaaagaagggaactacattgtgtaatatttcaaaatgttaatcttctatatgcagtttgttataggtctatttcctgaacattttcttgtgtgattttagaaaagrcatcaaagtgacgatcgagtcaacaaccagcctgttctgctactggtgaatggcaagtaagttcttctagagaagctggtttaggtaggaccagtcctgaaaaagggttgggtttagctcaggacaatgaaaagaacctcagacatagaaataatttgtttctagatctagcatgccctgaatttgtcatgtcacctcagatatctatgtgggcctcatttttcttttttataagatagaaataatattctctaccttagaggatgcwtgtgaaaatagaaaggaaataatatatattaaagcaattaatattttataacatgatattactatgcaagtgatattattagtgtggtagttagcatggaaacatctgtctttagaacattaatggattctgacatggtttttgtccattctactatagcctttggtcaggtcatcttttctgttaaaaatctaaacagagtattgatgttggccccactgctgtagtgtttggtcatagctatctaaagtgttgcaggaatggaagaaggcaggcatattcctatgtaaggcaaaatatgaagactatcctaagaggtacaaaaaattactatgggaattaataaaaatatgcaattataactggttaaaggaatcaaggaagactttctggaagaggtgtagtgtttgtactaggccttaagggaaggggaagaattcaacaagtagagattgtgttaaaggaaaagtgaccagtgtgggcagaagcatgattgcaagaaagtgcaaacctgaaggagttcaggattgaggtccagcctttatcatggtggccttactgaacacccaatagctatagtatttatcatataattctatcatctcaagagcttgggcagctaatcctgttgtgtattttgtctgctgattcttacacacgatggattgtttcctcaagagttttgacctgttgaaatgtcccataagataccgccaaaaaagtcagttgtagttaaaaagaaaagtagaggccgggcgcggtggctcacgcctgtaatcccagcactttgggaggccgaggcgggcagatcacaaggtcaggagatcgagaccatcccggctaaaacggtgaaaccccatctctactaaaaatacaaaaaattagccgggcgtagtggcgggcgcctgtagtcccagctacttaggaggctgaggcaggagaatggcgtgaacccgggaggcggagcttgcagtgagccgagatcccgccactgcactccagcctgggygacagagagagactccgtctcaaaaaaaaaaaaaaaaaaaaaaaaaggaaagtagagaaatagaaataaaaagaaaagacaaaactgagtatattaggaattgctgaccaaaaggatttagtcaaatgaactcacccaagtagcttgagcacttgggttttataagattattgaagaatttgtcacagagggattttaaggtgggagttaacaggcaaggccctggttagactttgtaagctaccgagtatctgattagattaatatgcagaggtgaggttggttgttgaaacagtctgtgttccagaaaacagctttctttttgtagaacacatgggtataaacagagctgctattttaaaagtttgtctattttataagctgtaatttttgtcatttttcatttctcaataattttgtttacaaacacatcattagtagaactttaagggaattctaagtggctggaggagaggttgtgtccctctataagggtttgtgtttgtttctgtgagttgactcaagggtattacctgctgatacctaatttgaaagaagtataaatttgagccccatccaatatgaggttacagattttcagggaagagtcctccattcactgacccccacaaccctccagactaagatagacaaactttcttgccagtgagccgattttttttagaccactctttcactaatggtgttgcccctcaagggtcctgactttatgagaaattcttagtttcaactcactgactctcaaaatcataaggctttatctcttgtccctctggtgggagaaattgaaattcaaattattagattattaagactggcaatccctccccaacccaaggcaagaacagcttcagaacatgcttactgttttggactacaggattgagtattttaaatcagtaaggaatgtcttcacctctcccaaatctgggacacatgattgttataatgtccaggaacaaattggtaatagtttggcagctccttatgtaagaaattattaatttttatatctccaggagaagctagaatgtgacagcacttgttcttctttatgttttactggtgacaaccgtggaagatagaatgccagagtaacagtgaatgtcaagtcaaggcaaaataaaacaaagacccagatgtctgtctccaaggcttatagctactattctacagtactatcagaaaattctttaaaagaaacagtggatttatataaaaggacttttttggaaaatttggccctcctcaaagcagctgtcttcttaggaaaggtgttctaggaatacccatgcctrtgtgtagctggcaaagtggtgatgtatgtcatgccctgcagatagcaatcctgcattcagagacaaaacagacagtggactgtagactttttcccgctctttgggtgcttggcataatataactgttgcaaggatatagctcatgtttccaaaatgcttgtggcaatatgtacattcttcttagtcctttctcagagaggaaggatttatggaccctgtgtatttggggaaattgaggttaaaaaaaaaaaaaaaagaggagggcagagaaccaccattattgtagaatctgctcatattgccaggctgccttttatggaaagtagggatttgaggatcaaagataatctaattttaacctaagtagataaaggccaggcgcagtggctcacacctgtaatcctagcactttgggaggctgaggcaggcggatcacgaggtcaggagttcgagaccagcctggctaacatggtgaaacctcatctctactaaaaatacaaaaattagctgggtgtggtggtgcaagcctgtagtcccagctattcgggaggctgaggcagaagaatcacttgaacccaggaggcagaggttgtagtgagctgagatcatgccactgtactccagcctgggagacagagcgagactgtgtctcaaaaaaaacaaaacgtaagtagataaaattgatgtgaccttatgacagaacacatttaagctatcaaaaagaatgagctacatcttctataagtgctctccaagatggattgttaaatgaaaaatgcaaagtgcagaaaattatgtatctagtacgtggcttttaaatgtgatttagatgtgtattatatgtgattacatggattggtattttctagaaataaatacaaaaatattattaacagcagctatctttggggagcaaaactaaaggctggaaatagaaaagactttaatttttccttttacacactttaccattggaactattttactttaaaaacctttttttttttaatgtttttgaggcagggccttgctgtattgctcaggctggtctcgaactgctggcctcaagcaatcctcccactcagcctcccaaagtgctaggattacaggaatgagccacgagacctggctaaaaaaaaaaaaaaaaaaaaaaaaaaatttatgtgcttatatgtctacaggtacttttgtagggctttagaacccttatagcctgaagtcaagagaaatgggccccactcttgattgcagcaaggatgcatcacagaacagtttgagccttgtctttattcctttcagccttttttggagggtggggaatcatcttgattgtcaaagcagagccttggggaaattctcagagcagatattcaagggtcattttcttacaggataaaggaggacaaatggatgaatgttcaagtgggagatataataaaactagaaaataatcagcctgtcatggtgagtacctcttttggctgtgacttgytcttttttggattgagtgggtaccagggactcttggagcacttctgctaccactccttttggtgacctttgttgcccattttgcatcagaaatcaacagctcttgcagtaagaagcttgttcttgcctatttctcactgtagttacagggaaagtgtgagtagctttgggagagggtgtatgatagcwgtgaaagaaagtaaatcagtgtctgtaaaatgcttaggttgaacatctgttcctaaggtgactgcttttgtcacactgtaatgttaacagcccaccttcctgctttcctgactttttttgacttttctgactacaggcagatatactattactctctagcagtgagccatatagtctgacatacatagagacagcagacctggatgggtaagtgttccctcctgatgctccattaagatgatttagccagcttagagtggtctctcactgagggacagcattaggcagggaattaattttattctcagatggaatattgaataggtgagccagagagcctagaaatatccagataagagaagatggacaccacatcgttgggaccctcaagtctaagactgagctcttgacaggaacaattgagcattcactgggcacagaatagggcaaataaaccccacattctccatctctaaattggagacactctggccatattctataaggctgagtagcaggaaagaggataacagaactgtaacatttcagagtacagtttcaaagtttccaagggaaaaaatgtgaatataaacatatctattcactgataaaataccatgttctataaaggatttaaggtagacatttattaacatccaaaagctaaggtcttaggaggatagagccatctgcagaaagcttatcctggagagttttgtattgatcttcattcctacaactgtacttcttgatgcacacaattttttgaaacatggattccatttttctttttgtctatgcattccagcaagcagttacttaagagcctgtcatgggccccataaatatttatgaggtgtggagtatgtttcctcggaggtatgtgcaagtttttaccaggatctgctccttattctttttttaaaaaattaaatttaattaaaaaaaatagagacagggtctcgctgtgttgtccaggctggccttgaactcctgagctcaagtgatcctcccgccttggccttccaaactgctaggatcacaggcgtgagcaaccatgtctggccatactccttattcttttttttttttttttttttttttttttttgagatggagtctagctctgttccccaggctggagtacagtggtgcagtctcggctcactgcaagctccgcctcccaggttcatgccattctcctgcctcagcctccctagtagctgagactacaggcgcccaccaccacgcccagctaattttttgtatttttagtagagacagggtttcactgtgttagccaggatggtctcgatctcctgacctcgtgatccgcccacctcggcctcccaaagtgctgggattacaggcatactccttattcttgaagggagcaggtactatctccaggttgtttatgatgtttcttcagcctctctagagcacctgaccagctagatctcatgagttgattaagtagtggcagtgtgttgcagagagtgagaggaaagagacgggagtgagtgagctaacactcagcttccttgaagagccatctcacctcaatactgagagagaagcagtgggagtgacttttacagctcagactcatagcccagtctctactggtaacatctattttctaaaaccccatgaaaaagtaggagatactgcacccgtacaacagttctgtttgtgtcctgtacagtggtcacktgtcttttactctagtgaaaccaacctgaaagtgaagcaggccatctcagttaccagtgacatggaagatcgcctggagcttctgtctacctttaatggtgagttaggaaatgggttttcctacctaaattttcatcagtagagtactggttaaataaagtatggtacatccatagtgatttctatacaacttattacaacaatatgcaagttgatatttattgaaatataaaaaatacaacatgtaattaaaagaaaaatacaatttacaaaagactgcatagtgtatataacataaacctgtttttggaaatataggtatgtttatgagtacttacatagaaaaaacatagaaggatgtacttcaaaaggtaaatagcacttttctcaagacagtgaatgaattttacttccttctttaccattttagtattacttaaacatttacaaagggcatatttactttactaatcaggaaaatgtcaagttgtttccattttgaaaaaaaatactaggttcgctttgagtcgtttttgagtttcttcagattcagagctcttatgatctggcagtactgatgtcaccatcatgtggggttttctctctctctggatgatccatgtcacatacagaattattcttctttagttcccagaaacctttgtctgcctttcttgaaggagctggtgagaaatgggcagtaactgagagaggataggaaaaagatgtgtatgtattttgaaagaagaattttatttcctcctttctattaagtctcctttcatccttaggaaaagcctaagattagagayccagaactcttacaccttcatttttctgcaggagaagtgagatgtgaggctcccaataacaaattggacaaattctcaggaatactgacctataaggggaaaaactacttcctggaccatgacaagctgctactctgaggctgcaacatcaggaatacagattggtgctatggcttggtgatctacactggtacgtttcccttggcccccagcctgctaaattccattcatggmtgagctatgggtacttagttttcaggatgtggatatgacactcagatatatttcagaacactatggttttgagatagataggcaggtagaaggatggatggatggatggatgggagatttgtgggaaaaaaccttgtttcttagggaaaaaaagtgccttctgtttccaagcaatgaacttccaacatatcggttctacctttgttagaggaaggcattgtgttccaaaaccacagggcatccatgagtctctttaacaagatctggacacaggagagggtatacatacagaggaagtatgatagaattaccatgtgaagggggagagtatacatatgaactattcccatgaagagaggatggacacaatgcttattatagagaaaaatataatgtaaaaagttcatgccacagaaaagtcacatatggatcattaatagtggcccctcttgagatgttatttagaaccacaattcattatatttagtaagagattttcttgggttatgatgtggttcaggaaaatggaggaagcctctgtgctgccccattctctcagtgacaacaaccatagtaggaaatatcaagaaagatttaccacagtgaatattattcaactcagattcccagagctccccttctagagcatctactcctagacatgaggcttttagactccttgcttctgtgaaaagtaatgagaccaaatccctagggagaagcttaagcgtctagggaggccctggtggaacttccttcattggttcttgatctagagtggcaatgactaggctacctaattcccaaactcaaaagacttaaattagacttactttcttcactgtatgtacttcagcagctactcacacacaattgccactcataaaagctcatttttcagcgaaaggtttttttcctgaaagcaataayagtggggctgccaaccagcacaaatgtagttaagttttcccaaggttggttacatggtagtgagtatctttgggaagctctgagcagagaactaatgccacctaaaagcattttgaggtgtttgcatggaattgagttgctgttcctgctacatgatgtccaagttctgtgatgatttctaccttcttcctgaagcctggggtaaggtcagtctaaggacccttagaagatatggtccctgtagcttccaggctatgagccaaacttctcatatcttgaagcccttcaaggaatgcttaagaggaaagaatgtcatagcttatgctctgcactcccactgtttgcccacatatcagagatgtcccagctccccatgtgtaaacattgatgaaattcctttttctgtcctttatcagaacacatgttagaataatggtcagatggtgaaaggccagagaaattattgcttacagtttcttctaaacctcttacattttctctggagccatagctcgaattagtaatttccagctctagtcccattggccattaaaagctccttacttctgcctaccatctgtcctgtcatgaagaaacatggaatctctgtctctcagctccagaggagtctcagctcccctgcttccacctcagaagaaatcactgccattgccttttcgtttcttccattccgagttagaaactttcagtatagcctgagccagcagtgagctttctcaaaagatgatggggatctctttatcagaaaattccttctctaagctaaataaaccagatggtgataagagagaagcttgcaactcctcttctaatttaacgcatctatgaaagttgagactgtctgaggtgctacaaagagagggatctgcatgaatgtactttacagaagtcattggaactatccttagaaaaaattttccgttttttgagttattgaaaaccgtgagcctttctctagggctttatcctctagcattggaaagtggttagattagattatcataaaggtacagttcagccaattccaagcctctgagtatattcagtgattctaatatctgatatcttcctgttttatttagggccagataccaaattaatgcagaatagtggaaagtccacttttaaacgaacacagatagaccatctcatgaatgtccttgtactctgggtaagttaaatacttttttttctttgtttctttacaaatagacatacttcccttcctttcacaggagaaatggtatttccagttcagaatttagctgtttgaaagtctcaagcacagcttcaagtgaagttaatctgaggtgaagcaaacagaaaattgtggaggttttgttggtgtgcaatggaggaacatggctcaagaaactaatcacagccaagtacctatgctttgttccactggctgcggattttatggaaaccctcgtacaaatggcacgtgttcagtatgctataaagaacatcttcaaagactgaatagtagtaatggtagaataagccaamctgcaacctctgaatctttaccagttcaatgcacagatggcagtgtcccagaagcccagtcaacattagactctacrtcttcatctatgcagccaagccctgtatcaaatcagtcacttttatcagaatctgtagcatcttctcaattggacagtacatctgtggacaagcagtacctgaaacagaagatctgcaggcttcrgtatcagacatggcacagcagccatctgaagagcaaagcaagtctcttgaaaaaccaaaacaaaaaaagaatctctgtttcatgtgcaggaagaaagtgggacttactaggtttgaatgcggtgtagaaatgtttactgtggtgtayactgttactcagatctacacaattgctcttaaaattacaaagctgatgccgctgagaaaatcagaaaagaaaatccagtagttgttggcgagaagatccaaaagatttgaactcctgctggaatacaaaattcttgatcatctgcaaactaaaaattgacttgaggtttttttttccctagtcattgggaaagtagagcagtgtatcttgcatgtcatcggatgaatagatttttgttttgattttgttttgaaaatgactctgaacatttatttccattgcaatttctgtggctgagaagacttaaactttacaagtattatccttataagatcattttaattttagttgagtgcagagggcttttataacaaacgtgcagaaattttggtggactgtgatttttccagtattaaatatgcatgcattaatcttgcagtttattttctcattgtgtacatatatattgcttttctttgcagcacgatttctcttttgataatgccctttggggcacaactagttatcggtaactgaatgtatcttaatcattatggctgcttctgttttttcattaacaaaggttattcatatgttagcatatagtttctttgcacccactatttatgtctgaatcatttgtcacgagagtgtgtgctgatgagattctaagtttgtgtgtttaaacttttttttgagcgagggaagaaaaagctgtatgcatttcattgctgtctacaggtttctttcagattatgttcatgggtttgtgtgtatacgatatgaagaatgatctgaagtaattgtgctgtatttatgtttattcaccagtctttgattaaataaaaaggaaaaccagaaaaaaaaagtctcaagcagtcttaggatcccagagattaagatctgaggcagaaaagaacagacaaattacaagagagtctagcttacgcctgttaggaagaatagtcacaaagtgtttaaaaagatatcatgctttgattagtggtacaagaatggatcaaggacccagtttagaaattaagacatatttttattttctcataatcagttttactcatgaccactttaataaaaccttacttagactaatagaacaccttgtttgaactgatgattttcaaactcttttcttagaggagtcttaaggtctggtgcagtgggaatagggaagatcaagtggattttattctatcctcctcattttgaagttcttgctttaaaaagaacagcttcatgtttatctattttatgaaatttcagttgtaaaaatagaagggggttctattaagaagtgaaatttgaaaagcactgcaatatataataatcagctttgataatagatgtttaaattgaagactagttaataaattatttctatgctgtctgatataagctgcctttattcttattagttatagacagattaatttcctctcttaaacagcttctttgcatagctgagcagttcctgtaatgcctacacttgatctcataacttttcatgtttatttttactctattatttagactctgaaaactcaaaaaaaaaccttttctttgtacactcttatcattaatatctgaattataaactgccttttttctttattatgggaaacatcccagatccttttcaaaatcctttggatctagcaaaaggggttttagaaaattaggaaggttcattcagctcagaatctagtattcgttcattatacttctctttctattatggagtaagtagttttcagcagttgatcaaagttccatttcctagtttcttaatgaagaagacaatcatggtcaagaattaaggaaggtaacatgggcaaatatgcttttgacaacattagcaacatacatcattagacagtaagctaggtcatttagcctaggcttgtcttcaaaacaggatgtcttcaaatgggtgtgatggcacacacctgtaatcccagcaggttgggaggccgaggcaggaggattgttcaagcctggaagtttgagagcagcctgggaaacagtgagaccccatctctataaaaaacaacaacgaaacacaaaaacacaggtggaacaagatggctgaatagaagtctttattaatcaccccccccacacacactcccacaaaaacaccaaatttaacaactatccacatataaaagtaccttcataagaaacaaaaatgagtcgaacaatcacaatacctggttttaacatcatatcaccaaaagaagcattgaagacaatcttgaattgctgatgccaccattcccccatctcctggtggccatgcatggtgcagagaacttgtaagctttggggagggagagcacagcaattgtggaaccctgcattgaactcagtgctgttctgtcatagtggaaagcaaaaccaagctgaactctgctgacacccacccatagagggagcatttagaccaaccctagccagaagggaatcgcccatcccagcagtcagaacttcagtttcgtcaagcctcaccaccttgggctaaagtgctctggggtcctaaacaagcttgaaagcagtctaggccacaaagactgccattcctaggcaagccctagtgctgtactgagctcagagccagtggacatagggggtcggggtgggtgcacacaacctagtgaaacaccagccagagcagagaagggagtgctaatgctacccctcccacaaccccaggcagcacagcttgcagtaacaaaagtgactcctttcttctgcatgaggagatggaagagtaaagaggcctttgtcttgcaaattggagaccaggtcagccacagtaccatagggcagtggacagagtcacgaggcccccattctaggccctagctcccagacagcatatctagatacaccctggaccagaaggaaacctgctgccttcaaaggaaggacccagtcctggcaggttcatcacctgctgactaaagagcccttgggccctaaagaaccagcaacgatacccaggtagtacattgtgagccttaggtgagactgtagagtggcagcatctagacgtgctggcttcaggtgagacccagcacattcccagccgtggtggctatggtgagagacttctgtttgagaaaaacagagggaaaggtaaaaaggactttgtcttacagcttaggtaccaactcagccacagtggggtagaacatcacgtgggtccttggtgcccctgattccagccttggctcttggatggcatttctggacctgccttgagccagatgggagcccacttccctgaagggtgagtcccatgactgacagtattcaacacaagctgattaagcccttgggccttaagtgaacattggtggtagcctggcagtaccctctataggtctttgatggtggccatgggcactggctcctttgcctgtggaaatgggagggaagagtgggaaggactttgtcttatggtttaagggtcagctcagccatagtagaatacagtaccaggtagacttctaaggtttttgacttcagtccctggctcccaggctgcatctccggacaccccaggggctgaggaaatttgctgcactaaaggaaaggacataagcctggctggcttcaccatctgctgattgtggaaccctggggcttgaagtgaacataggcagttgccaggtagtggtcacagcgggccttggatgagacccagtgctgtgctgacttcaggtgtgactcagcacagtcccagtggtggtagcctcagagttgcttgtgtcaccccacacacagctctaggtggcttggcacagagatagactaaatctgttagggagaaaggaaagagaacaagagtttctgcctggtaatccagagaattcttccagatttattcaagaccaccaaggtgatacttctatgagtctgcaagaactgcagcattattgggctctgggtgccctctaatgcagatatggcttagatcacaacacccaagtcctttcacatacctgtaaagccttcccaagaaagataggtaaaaagaagcccaggctgcaaagactatacaaacaattaataactaactcttcaatgcccagacaccaacaaacatccataagcatcaagaccattcaggaaaacatgacctcaccaaacaaactaaataaggcaccagggaccaatcatggagaaactgagatatgtcacctttcagacagataattcaaaatagctgttttgaagaaacgcaaagamattcaagataacaggaaggaattcagaattatatcacataaatttaacaaagaggctgaaatagttaaaaagaattaaacagaaattctagagttgaaaaatataattgacatattgaagaatgcatcagagtattttaatagcagaattgatcaagcagaagaaagaattagtgagcttgaagacaggctatttgaagatacccagagaagacaaaagaaaaaaaaatgaagcattcatacaaggtctagaaaataaccttaaaagggcaaatctggccaggtgcagtggctcacgcttgtaatcccagcactttgggaggccgaagtgggcagatcacgaggtcaagagctcgagcccatcctggctaacatggtgaaaccccgtctctactaaaaatacaaaaaattagctgggcttggtggcgggtgcctgtagtaccagctatttgggaggctgaggcaggagaatggcgtgaacccgggaggtggagtttgcggtgagctgagatcgcaccacggcactccagcctgggtgacggagcgagactccgtttcaaaaaaaaaaaaaaaaaaaaaaaaaaaggcacatctgagagttattggccttaaacaggagatacagaaagagatatgggtagaaagtttattcaaagggataacagggaacttcccaaatgtagaagaaggtattaatatctgagtataagaaggtttagaacaccaaacaaatttaacccaaaaaagactacctcaggcatttaataatcaaactcccaaaggtcaaggataaacaaaggattctaaaagcagcaagagaaaagaaacagataacatacaatggagctccagtacttcaggcagctgacttttgagtggaaacattacaggtcaggagtgttatatataaagttttggtaccacaaagaaatagcactcaaatataaaattttctttttaattctcagcaaggcaagttacttctatatagaagggtgcgcccttacagatggaacaatggtgagcgcacacttggacaagggaggggaaggggttcttatccctggctcacgtggcccctgctgctgtgttgttcccctattggctagggttagaccgcacaggctaaactaattccaattggctaaagagaatgatggggtgagtgctttggtgggagtcacggcagagaaggtagcaggtagcaggtaattggaatgagttagggtggagcaggtgattggaatgtagggtggagcaggtgatcagaatgagtcagggtggagtatataatcgaaaaaggttgcttaaagaggaagtttaaaagtagaagaattgaacatatggacatattaattctttgaaaagaaatttaaaactcatttctaataatcccttcccttgtatttccttacagctttcttttcaaactttttttttaacatgtcttggcttagttgttttgcttgattttctaaaagaagcagcttctctggataaggtggaagatagttaagggaggttttagtaagtgccatttttatgagcctctgcatctacttaaggatgcatggtatgacacagcacctgacaagaataaatacacctattacagctgtgagagaagtaagacttgaggctatcattccatctaccgaacttttttttagccatcctgtaaaggggtcatttacccctgagttgctggctaactcattggatagagcagtcagaccttgcaatgcttttgttatacttttattacgggtggtggtgtttgggatgaaggtgtaacgctgagttttaatcatgacgcaaactcctcttctttctgctaatatcatgtctaaggctatcctattttcccaagccacctggctattagcccctaattgctcagctattcctttaacagcatctctaatgtagttaataaatcgctgttgattgtaatagatgtagtttatccaatctacattttattaattgtcacccaccaaaatattgactcaaatcctgcagctatttgattttgggctttaaattgatctggtattccccgtgggactttaattgtgtctaaatagacgtgagagttgaaagacctataatgggcttctctcgctttacaatgtctaatttttctggttgatgaaatgccagggtgaaagggatagccaactggactaaagcacaagtgccactccagttatttggcagagtgtccagtaaaggtccaccacacatccacttggggatgaacaagggctgactgattgataagctcttgaaaattcttaagctcactgcttcccttcaggtctccaaggaacactaagtttcctccctgtcatgagagacacgaagggaacttagtgttaggagatggaaactggatggcccttgggggctgacccgcagggtgccagagttcgggatatagcagagtgagagcttggcatgacttgttaccccaggctgtagaatcttggaaaagagctaccatgcagcccatgcctggttgactggaggaccaccctagtggaaaggggacagtctgggcctctggcctgccgtgcacacaagcctaacaattgtttttgtttaacgtgcrgacagaatagttgatccatttcaaccaggcatttacatccttagtatcctgtctcaattgccaaagtttgttttaagtctttaacttctaccatcactatcttggccttgtcactagatggaggaggatcaatggttccattgtgagaggttttggaaaaaggcttagaggcagatgtaggcggcaggggatcaaggaaatgcattttaaagaatccaatagggtctgtccctgaaacctcagcccccataccataaaactggcttaaacaagggaaccggcttagaaaaggggagaactttgggggcttgaaataatagcctgtatagggttgcactggtttagctgacagttaggggggctgtccctttagtaaaatgaatgtatcgttttaggaaattataaaaactggttggggcagtctatccttgctctttagtggtccacagaacgttggaccaactacggcataaaagctctacatcggggggcaagactcatggttgacactggggtctttatcaaaatctccctggattaaatggtcccaatttactaatgcccattctgaggagagtcaggagggacagaggtacttttctgaagtagagagctgtctttgacttggcaagtccccacaaggtataacaaggcaagcattaaatgcagtagtttgaggtgaaattgacttggttatgttaataactggatggtcagcaatagagcgaggaaagaagaaaaagtaatggaatagatgaaagagttaaatttttcttagctttagtttggtagggttttcccctgggattgtggcccaggactctggagggagtggcgctttgactcgtgtgtgatgagtccatccctttttcactgtatgaacagcagtctcggtggttagcagcacaaggtagggtccttcccatgctggctcgagttttccttctttccactttttgatgagaacgtgatcttcaggctggtgctggtttactggaaattctaggggtggtacctgtgctaaaagacttttagttttgagggaagataaaccaagtatataatttctaagaaattgaccttttgttttaaacgtggggacatcagcagtggactttatagtctttggtgccttcttactgagaaatttcctttagcacctatttttattagtttttagaccaaagaatgccaaacaccattttatatttaacaatgcttcctgtatgatttttataccagataagctaaatttcacctttatattagtgtgttattaatgttaaacttaattttaataaaaccttgtagacatatttatccagtttttaatgtctgaccataaggtaagattttatagactctttttaaccttttttataatttttgttaaggagcaggttagtgctttagaaaaacctgttgtgcttttattttaatgtctagttcacagaaaaactggttacctctttaactttagctaatatgtttacatacagaatttcctttacaattaacgttttaaaacttgcttagacctttaaaacaaaatatatatatttttcaccttttaatgtaggtaaaaattcacattcttatgcctccttataatcttgttaccaaaagtatattttactttccttacacaccttgcacataaactgtttcttcaatagttttacatttaggaggtctaattacttttaaattatacaacatttcttgcataaatttccttttataacctttttttcacacaactttcacagataattcttcgacatgcctcaactttctttcttttttttttttttttttgagatggaatctcgctccgtcgcccaggctggagtgcagtggcgcgatctctgctcactgcaagctccacctcccgggttcacgccattctcctgcctcagcctcccaagtagctgggactacaggtgcccgccaccacgcccggctaattttttgtatttttagtagagacggggtttcaccgtgttagccagggtggtctcgatctcctgactttgtgatccgcccgcctcagcctcccaaagtgctgggattacaggcgtgagccaccgcacccggctcaactttgtgacttgttgcaaacatcccttttttttaaaaaacaattagttaatttattttaggacaagaatttaccgtatagcattctttttacataaactctccccccacctctttttttctttttcctttttaaattttcctaaagatgataaccattcttttytaaagcgaacttgcttcatgtctgtggactagactgcctaaggccataagattagaagttaggataatacgtgttatattgataacttttagcaaactttacttttgtcgaaaaccttctaagtttgggatttcaattatcctttgctgttaataagaccttgtttagtctaaattaacttagaattggtatagatggttccttcctggtctgtgagtacgtcaaggcttggctgagtgcaaacagcttgcaggtttgagcagaccagttattaggaaattttcctaactctgcttctacaagagtttccctatcaattactgaatacccactgtcgtttgtttttttttttttcccctcaatcaaccgggaggaaccatctatcgtcctgtcctgaagagggttcctcctaggtctggtcggacctttgtatggtaattaagatttaaatccccagttaggaaacctgctgggttaagggaattttcagtggttaatgataaatcatctttttctaacagaatagccctatactttaagattttttagtaagctacctttttgctttttgacttaggatagttctgaactggtgaggtgtgctcacaatgaggtttcctctaaaagttatttttctactttcttctgttagtaaagcagttgccgctatagattgagtgcatttgggccatctgctggttactgggttaaggatttttgataggaaggctacagattgtcagtggcctcagtgctttcgggctacacccttgtttacactgacaaagaggtggtattggagtgttatagggtcacagagaagaccttcaattatcaactataggttttaaatttaccctggcttttaaaggaatagggtacactgtttttttctttactacttctatttttctctttctttctctttgactttctctctttctctctttgactccctctttgtctctctgcctctttcccctctctctctgcctctctttcccctctctctctctgcctcttcccccccccacacacctctctttcccctctctctctccctctttcccctctctgtctctctctgcctcttcccccccacacacctctctttcccctctctctctgcctctttcccctctctgtctctctctgyctctatcccctctctgtctctctctgcctctcttcccccccaccgcgtctttccctctctctctgtctctgcctctctttccctctctcctctctgtctctatctcgctctcctctctgtctgtctctctctgtctctctctctcttcccctagggtagggacctacgggagtggaactactctctcttcccccaagaagaaaggaaagggcagcggkggggttgtgtcaggttcaacccttgaaattagcagaaggctcaacccctcaacaccagggatgtctcaccttgcccgtcctggaaggctcaacccctcaagccagggggtgtcttgcctgtcctggaaggctcaacccctcaaaccagggggcatcttgccttgtttgccctggaaggctcaacccctcaaactagggggtgtcttgcctgtcctggaaggctcaacccctcaaaccaggggtgtcttgcctgtcctggaaggttgatctgtttctccccttttccccctctgaaggtcctttgcacacttcctactcatgctgccctctctggctgctcccccaaggtagaatcaggcccttcttagtgttggcatgccagtataaatcctatggcaggatccgccctaagccatatgaggtagctgtggaactgcagagaggacccactcactccgtcgagcagtaggacttgtcaccatccacatgaataacaccacaagcagggttgttggtgatcattcacacacacacacatttagccctccagaatttgaccaccaaggaagtactttacgggctcccatggcatctccttccttggtctgtgcagagtcatcactgcagtatgtgaggatcatttaagctaggttgctggccagtaccccctctccctgacccctcgtgttgttaagagctcaggttattcctcacactgggtgggtcttgatttctcacccctgaggccgccacaatagggccgggtgcacctcctcacgagagagaaccagagacagtcctggaggggaatgtaatcctggacgagccccccaaattgttatatataaagttttggtgccacaaaagaaatagcattcaaatataaaattttctttttaattctcagcaaggcaagttacttctatatagaagggtgtgcccttacagatggaacaatggtgaatgcacacttggacaagggaggggaaggggttcttatccctggtgtacgtggtccctgctgctgtgtcattcccctattggctagggttagaccacacaggttaaactaattccgattggctaatttaaagagaatgatggggtgagtgctttggcaggagtcagggcagaagagcaggtagcaggtaattggaatgatttcgggtggagcaggtgatcagaatgagtcagggtggagtaggtaatcgaaaaaggttgctttatgaggaagttaagtttaaaagtagaaggcaaataactgaatatactgacatattaattctctgaaaagaaatttagaactcatatctaacaggagagagtggcatgacatatttaaaatgctgaaggggaaaaaactttacctagactagtatatctagtaaaaatatctttcaaacatgaaggaaaaagaaagatttttccagacaaacaaaagttgagcagtttcattaacatcacacttgtcctacaaaaaaatgctgaagagagtccttaaactagaaagaaaaggacgttgagcaataagaaatcagccaccatacctggcttcattgtagttttgatttgcatttctctgatgatcagtgatgttgagcaccttgtcatatacctgtttgccatctgtatgtcttcttttgagaagtatctattcagatcttttgtccgttgttaaattggactattaggttttttcctgtagagttatttgagctcattataatcccagcacacaggcaaccaaagcaaaaattgacaaaatgggatcacattaagtttaaaatcttctgcacagcaaaagaaacaattagcaaagtgaagagacaacccacagaatgggagaaaatatctgcaaactgtccatctgacaaaggattaataaccagtcccaaacaaaagaactgcttttgaaagaaatttaacaacctacctgcagagaactaaggcttgtaaatctgagtgtcagcacttagagtaaaacccacttaattttaaatttggggggcttgagtttgcctgcaagtttcttgtacatcctagggtgaaatttgttaaaaaacgtattctttctaccaacagagaactcatggtttcccattcaagggagtggcctgttaggaaaacaaaattaaccaaaagaaatgaaatctactccagcaacctataataatcaaactattattttacttatatttttaagtggactagagggaaacaagtagcataaaaaggtggatgaggatgaacaaatagaataactgaccctggaagctgggtgtggttcccagctacttaggaggctaaggcaagaggatcacttgagcccatgagttcaaggctatagtgcaccattactgcacctgagaacagccactgcactctaccctgggcaacttagcaatatcccatcttaaaaaaaaatacctgaacctagaataaacaaattatatttcagggaagagaaaagaaaagaactttaaaacatttttatgactagtctcagagaaaagaaacaattacatatataaaataagaataggttgctttaaaagggggaaagaagaaaaatatctaagaacaacaacaaaatagaatttgggaaatcaaaaatgggattgctaatatttttttaaaacccattaaaggattaaaatctctcctggaccataaaacaaaaagacacagagacagaaaatattagagaaataatttgtttttaaacagaggatcaaactagaaaggtttagttacagagaagagaaatccctttaaaattcttatagagataaaaataagatattaacaaaaatgggaagcagattggtatcggatttctcaaaagcaccattgggtcctagaaaccagtagggtcataccttcaaagttcttagtgaaaaatattttgacctagaaatctgtacccaggaaaactgcaagtcaagtaagagagcaaacttgttcctaccctaggacctttacccttgctggcaatgtctgcccccaagtctttgcatggcttgcttctttttcatcatttaatgctaccttttcagataaaaggtctctaacacccccatcaagaccctctattctattaacctgttttattttcctcacagcatttatcactaaatggtatttttttcatttcttgtttgttgtctacctctctccacaaggatgttgtcttttttcaccactgtgtccctaagtccctggaacgatccttgacatataatgggagcttcattattatttgttgagtgagtgaaaaaaatgaatgaacgtcttagccaacagattatgagcctctacagtagaaattacaccatattcatcttcatatttttggaagtgccttgcacaaagtagtgcttagtaaatctctattgaattattaaatgaagaaatgttcttgaattagctaggttcttatcagctcagcagttttgtttctgtggtatttgtgccaggacattgtcaattagtcatatgtaaaacacttccatttcttgaagtaaactgaaccagaaatccttcctgatttaaacacttcattttcccccattttttggaaatgcctcttagaagaaaatctggcagacacaggaagcacgtttagcaaagctccttcctgatgagcccaccgctgagctgggggttagatcccttctctctccccagtgaccagaactcccagtgacaatgccttctaaatcatgatctgttaactaggagtgtatttgtgagacaaatgagcaaagtgcatgaaattgaaatggtgccagagatccaggatctccttctggggtaaggcacaatgtaaaacacagatgtgaagggccaaaagcccaaggagtgctttcttttgacaggctgcctgaggccagggagcacctttatgagaccagtggccttgattttggtcagttttgtcaagagtgacaaaattatttatttcactctttattgaagccacttyttgctaaatgggaggctgtctgtgcttctttggtctgactagctctggtattaagtaatctctagggtctgtagcaataaccaaacaaactgatgatttattgtttctttctccttatggaaaggaagtaaagtgaagctttaaagactaagtaccaaaaaaccctatcacaataaaaagaaatgtagaacatctgcaagggctttgaaggcctcatgatggcaggaaaagctctagcaatgaagaaagaaaacactgtgccctacaccttcaggattcaggctgtcagggtagccctgctttctggggcttgggctgataagaagtggtcttcctttctggtggcttagtttgagcagtagaactcaaactcagatcaataattcactgaggctttatctgaaccatgagaatagctttgttttcacatgattaattgaagagaaagataagaagtgggaataagattgagaaggaaagattgcatggccccagagaaaccctcatcacaaagagctgagctactcagtgtgaatctggactgggctaggaataaaagcagattttatgtgttttatcccaattctcctttgttttgttgttccccggcccctcactcaactctcaaataccagtttttgatactgaatgatattaagcgtttagtgctaatttttaagtgatactggttttgattgtgttttaaaataagatcttaaccatttagaactatatattaaacagatgaaattgcataatgtgacagatttattctgagaaggcaggggaagaggaggtttggatgaaattagactggctatgaattgacaattgttgaagctgggtgatgggtacacgggtgcatgggggtttgttgtcctatttatatactttaattggtgttttaaattttccataataaaaaataatttaaaatatcagtttctgggaatggtcccagttagacctgttcctcctacttttctagtcttgtcttcaaagaccttcccatcagtagcacaaagatgaaacctcccattatctagcaatggggatggtttgctttgagccagccatactttgtgaccaaggtcacagatgtgaagactcttgggtagatgtaaagactgttgggtagacttcgaggtggttcaataacatcatgttgtctctagaggcaggtggacatatagtgctggtaggaatgtaaaatggcataataactttggaaaacatttggcagtttcttaaaaagttaaagataaattttttataggatccagtgattgtactcctagatatgtacaaaggaaatgaaagcttatgtccatgcaaagacttgtacacagatgttccatacagccttgtttacaatagtcaaaaactggaaacaacccaaatgttcaataaaagaaaaattagtacacaaattgtgcaatatcaatacaatagaacactactcagtattaaaaaaatgaacaattgatagatgcaaaaacatggatgaatcccaaagtcattatgctaagtagaagaagccagaaaaaaagagtacatactatatgattccatttgtataaaatctaaaaatttcaaatattctaaagtgtcagaaagcagattagtggttgcctgaggaccaggggaagggagaagtgggaaggtggggaggaggaattcaaaggggcacgagaaacctaggaataatgaatatttcactaacttgagtatggtgatggtttcacagatatgtgtgtgtatgcgtgtgtgtgtatgtctagtatatarttgtatactttaaatatgtgtgattttagggggatagtgactgaaaggggacatagggtggtttatgggtgctgagaatattcaatttatttgttctgggtatttgttccattagtgtgattactttgggaaaattcatcaacatatatctgtgatttctgcatatgtctttatgtgtgttaataattaaatgttaaataatcaaaaatagagggcatcagattaatctggaactatgagtagtatagttgtattagtcaaaataagataaccaaaataaaaaaacagccttaaaatctcagtgacatgtgacaatacaatgaaggttgttgtggggaggggcagcttgctccaccaataactcaggaacactctttctagctaatggccccaccaayctcttggatttcaggatcttctactggattccctgcattcaaccagcagatggggaaaaagagagaataggaagactcacacatgattttttttcttttctttttttttttttttgagacggagtctcgctctgttgcccaggctggagtgcagtggagcgatcttgaatcactgcaacttctgcctcctgggttcaagcgattctcctgcctcagccttgaggactgagtagctgggactactggtgtgtgccaccacaccccgctaatttttgtatttttagtagagatggggtttcaccgtgttggccaggatggtctcaatctcttgacctcatgatctgcccacctcggcctcccaaagtgttgggattacaggcgtgagctgctgcacccggccacacataatagatttttagggccaagcgtgtaagtagcataatcacttccaccagcattgcattggctagaacagagttacatgacccatataactgcaagagagcttgggaaatgtgctctagatatgtgctcagaaggaaaagaaaatagaatttaatgaatacatatcattatcgctgccacaatctacccttctgatcatcataccatttcacttttcctcccacatatggaacaccctcatcatctcccccaaatcctacccagtctctgcatccaactcagagtccaagatctctcactgatgcacagtcctctccatcagatctaaatgaagttcctcttggtctggagatgtgagaggatctcctttattcattgctctcagtgatttctggctccactcctgagaagttttccctcattctttatccttgctgaccaaccctgaagtggatgttggggagtatgctcttcttagggactgcagtttttataacctgcttcctgcccagtgtggttttaaggatttccaaacagtcacaggcttttttagaccaggctcatagttatctagtaataccattccttcaaaacccataaggcttctcatctgtttgcttccaattagtttcatgtatcagtaaccccctgccccccaaaattctttcctagacgtagtttttgagtttatcctgtttctttgcttccttgcccctccatgcccttctctctcaacttactggcaagaaagttgaggctatgcggaataatagtcatgggtaagaaggtatcacctttaacytgaactttgcccgaaggctgagtcactttattcagttgaaaacaattattgggccttttttgcttaaggtctcaatcttatctcttcctgtttagtgtctagaagtcgtagttctttgatgccccaaatttctgtacctccttatttctgcctacaaattggctaattctttccctagtttaactttaaaaaaaattttttagtacagatgaggtctcagtatgttgcccaggctggtctcaaattcctggccccaagcaatcctcctgtctggtctttccaaaatcctgggatggcaggcatgagtgactgcacccaaccaactctttcttttaatacctgtcaaaggcagtcaatacacaatgatattttgattctttttaaccacttctcttagagctgcaggttcagtaggcatatggtctacctttcagttttatcaaattctttcatgttaacatgactaccatattttcagccttttatatcagtttccttatcacccaccccctaactgctaagccccacacgttttagacttctgttaaagcagcttcaataatggaatgattacgtgcttgggttctggaactggttcaaaacctgtttcttctactcagtagctaagtgactttagacaaaattctttctcactcttaagttcctcatctrttattaaaagaggattattgtaaatattaaataatatgtataaatacttagcatagtacctagcacttrgttagttattactatgttttattactattatctcccttgaaaatcccaaggagggcttctgctggactttcttttctgtcctatgtactgctgcctagagactgtgaactatagggcctccctgccctcctaggmgagggacgctttgctgagagataaggctctagactgtagaactgaagcagcacatatgttggataaaatgttaatttaattcttttttttttcatgtatcgattttcctggttttaggcatcgtgtgttttgtcctagcagttgggcatggcatttggcagaacaagaaatgctaccacttccagatttttctgccatgggtaaaatatgtctcttcatcagctgtctctgccatcctcatattctggtcctacttcattattctcaataccatggtgcccatttccctctatgtcaggtaggcttctttgatcactttggggtgtgggggaggagctgacttcatactgtctacttaattccccaaccagagtgtgaacttttaaaaagcatacacttgtgctctttaacccctcactctccacagtaggtggtgtacaaaatgctstgagatatatctagaggttgcataaatgccttccatgtccagaatactgtgctaggaagacactatgtggtttatacaaaaagacagttatccctgccctcaaataacttataaagtaagtggctaaataagacataaaaacacatgaaataactagaaaacatacacacaaatttggtgatgcttaaagcatgggtagtttccccaggaagataggccaggcagcccatagtttaccaatgagataggtccaaacattcacttgtaagtcaattaatcagaattcagaatccattttcccacacaaacagtgtgacagatggtagataggtgtaattgtgacctaagttcaactcctaaaagttgtggaagagaagaggaagggtttcccttcctctttttcataagcaccttgaatgaaaatttgaaatagctgaaaaaagtatttaccctactctgatcatccttttctgggttctgcatttccttacacatacacacacccaaacacattttagtttcctcctttccrggctttctaaaccctgtaccggggctttttggcaataaaaaaaaaaggaccctatgtaactagattaccttatttagtaatatttattgagtatctactatgtgctaaggtttagagagattgctatggtggctgatatggtaaaggatgggaggggtcccaactccaggcatagagattatcagtaatgagtcaatgatgaggacctgagcacctccttcctcacctcaaaggaaaaaatccccatctgtcagtgcagctgtctcagacagggattactaataatcactcttataataaagcagactaacacacattaagtatgaatgatgataagaaggagaccccttaaaagtcttcactgttttaaaatgaacatgcttgttagccataaagaatctataatggacgctatttggagcagaagaggagtatgacagaggcaatagggaaaacttatataaaatgagaagaggttgttgtgggaggagacacaccacaggcaggctggctctgcctggaaatttatcagagggtcagcccataaactattcctgattttcatagcttctttccttcttctgaaataaactctgagtgtgtcaaggttctctgtcttccccatgtgacaggagcaataatcctccaattgggccaacacagccttttataagttaactgttactctatcacaccttgcattactgcagaaattccaaaattgtaacttttcctggatacattatggaaaaaaaaaaaaagaataaaagccaggtatgactcaaaaaagttaatcaagtatatctgggtccaggtggtaaagccttgggtgataatggccaaagtcagcattacaatgggttggctggtgggaagggtccttcagaagggtagaatcccaaggaagacactctgattttcagatgcttagccctgctaagaaagaaaccaggatgatatatttgcttgtcctgttctgacgcagaaccattcwttttctgctttctccttagtgttgaaataataagattgggcaacagtttatatatcaactgggatcggaagatgttttatgcaccaaggaacacaccagcacaggctcgtactaccacccttactgaggagctcggccaagtcaaatatgtgttctctgacaaaacagggactctgactcagaacattatgattttcaacaaatgttctattaatgggaagctctatgatatgcatgtcttcctgctttccccaagtcctgggaaatttttactttgcaaattgttttcaagactaatctagctctaaatctgtaagcctctggaattcacatttatctcctattctcacaactgtctctattctctaagcaaagaccacccagcccaaacagttctaaccaaaaagcatttatttagcatcttataggtacaatctattgtgttgggcattgagaataccgagatgtgcaagacttagtctctgtcctcaaggagtccccaatgtctatgtactcagttcactcccactttaaatcagatggatgttggtcaaagggtacaaagtttcagttaggcaggaggaataagtcttcaagatccattgcacagcatgttgatcctagttaataataatgtattgcatatttcaaaattactaaaagagttttaaatgttctcactacaaaaaaataagtatgcaaggtgataaatatgttagttagcttgatataatcattccatggtgtatacatatatgaaaacatcacattgtatccataaatatatacaattagtatttgtcaattaataataaaattaaaaataaattaaatggagcagtcaatgtattactgaagctgctaatttcttgattcccctttacagcaataaatattattgagagaaaccatcaaagggtagtcagagtttgatcagtgtctcccaggcccaatcccttatttatcttatgccttaagcataagcttgtttttgtgatagagttaagtcctcatgtgtgtgaacagtcatacccagtgtcctagctaacagaggaaggtaatcacatctaaaaaactagaacacatggaataatctttctggggtgacgaaaaagtttagaaacttgagagaggtggtagttgcacattgtaaatgcactaaatgcctctaaattgtacacattaaaatggataattatatgttaactaagtaaatttcatatcaataagtaattgaaattttttaattaaaaaaagctaggccgggtgcgttggctcacgcctgtaatttcaatactttgggagtctgaggcaggcggatcacctgaggtcagaagctcgagacgagcctggccaacatggtgaaaccccatctcaacaaaaaatacaaaaatattagccaggcatggtggcacatgcctgtaatcccagctacttgggaggctgaggtgggagaatttcttaaacccgggaggtggaagttgcagtgagccaagatcatgccactgcactccagcctgggtgacaagagtgaaactcctgtctaaaaaaaaaaaaaaaaaagactagagcactctaatatttcctattatttcctatatttcctattatttgtttggtaaccatgtcaaacaaattttcacttatataaactctgaaggcttatttttggatgagctgatttgggtgagcctcttaattctctgacctgaccatatactgggtaaagttgaaaaggaccatgagtgtttccatgcttggcatcagacatgtcttctacccctattcagtctgtcatccactggtcaagaatcccaaacattctaaaactgtgtccacatctcttctgggtaactcttatgattggagggcttcctgaggtgtgaagtctatcacagatccagtgactaacttctagcttcatcttattctcacttaggggagaagagttgaggcccaagcaaacctcttcttaccattggcttagggaaaggagcttactgggaactgggagctaggtggcctgaggagactggggggcaggcatcttgactgcaagtctaggatgaaggaatcagaataaataagcttttaaggcccctcctttaaatcaccatatgacccagcaatttgattcctaggtatatacccccaaaacttgaaaacaagaactcggatacatgtataccaacgttcattgtgacattattcgcataagtccagagatagaaataacccacatgtccatccacagatgaatggataaagaaactgtggtatagcatatacatacaatggaatgtgaatcatccataaaaagtaatgaaatttgatacatgctacaacatggatgaaccttgaaagcattatgctaagtgatgtaagctaaacacaaaaagacaaaaattttatgattctacttatgtgaactatctagaataggcaaattcatagagacaaaaaatagactagaggttactaggggctggtgatgggaaaaaatgggaagtttctgtttggggtgctgaaaaaatgttggaaatatatagtggtgattgttgcacaacattgtgaatataattaatgtcattgcattttacatttaaaatagttaaaatggcaagttttatgtgatatatatgtatatttttttaacaacaatttaaagaaattcaaaccctcctttaaaacccttgccaagtctctgctgtgttcacttaccaacaggtgatacttatgrcaaggatggacagagggtgacggtctctgaggtgagtgattacagctccatgggaaatgcatgtgggagctgagtgaggctgtgcttcagagaagcatccttaatacaaatcgagactcccttagccactgaaatattaaagcttttactggtcctgtaatatcagaaagcattatataaatgacctatgtttaattctgaagatcttcgtttgttctttttaaacaaaaatagctttattggctttttctctttaaaaaataatccatgctcactgtaaaaaaaaaaattaaataatacagaaatgtgtgaagaaagttaaaattattccatcccatttagatagccagtgtaaagttggggagtatatcctatgcttttcatatgtgtatacacacacacatatgtacatctagatctagaagatgggggagataaaatcatagtatgcatgctatttccagtttccttttgttcacttgacactattattgtcgtcatctttccatgtcggtaggtctaggtctacatcatcattttgaatgggtgtccactattcagttgtatcactgtaccttaatttatttaatttcttatttttattccattttcctttgcgattacaaatgacattttggtaatcattatggaacatacattttgtctacttttctgataattatttctttagaataaagtcctagaagtaaaattcattggtcaaaaggtagccacgttttaatacattaaatagtgccacattgccctccaggtagattcgcataactttataatcccaccaaaaatatatgacattttgttttcccccatatgcttgtcagaactggtattaacaatttttaatctgttgaaatttaattgatgaaaaatggtatctaattatttaatttaccttttttgatgactaattaggttgaatcatttttatgtgcttatttttcttccccttatcatctctttattgcccatttacacttactttgtgaactgtctattcatattctttggcctttttttcttatttgaaaatgctctttatacagtaaaaatactagctcttcctttttctggtgcatatgttataattatttttcccattttgtcttttggtttttaatttgttaaataatattttgtgtagaagtgtttaattcatgtaatcaaatctatcagtcattttcctttgtaacttaaggatttgtgacatattcaacaggctttataaaattataaaaatatcttcctattcattcttcttatctctagttggtttttactgttttctctagtattggacccagcttttgtttatggatttgtttttaagtgtcccttcacaggggttcttctgctgccttcagggtattcctcaccttatctctgtcttgctagacccaattccaaactgagccacttgacttatgtaccaaacatctgactccagttctcaactgttgccttacccctgtccatccaaagagattgggaaggggaaggaaattcagtgatttgccttaaatcatcttccaggggcttggctaatgaccttggcaatataggcaaaattatagcttctagggagtaaatccctcctggagtttctttcctctccttctgtccactactgattgaccgtaacacatttttcactaaatcactggaatttttgttctcttataaacaaacttacctatagcctcaatcccttcattaattgaaacatgattttccctgagaacattcctttttcttccatctctctcatactctgcataccataaactctggataccataagcccaaaggtgttgccctcattatcctgtgccatgtttaaccattagtttttctctcctacacaatctttcttcctgtgatgcttatgacttctggctatactcatctgtaactcttcttgttgttgatatctaggaagcttctggcttctacaccccattcattgagggctttgaaacttctccctcccctcccaaccactgctattgttttgggtggtattgtcatccttatggacgacctatcactgtagactctttcaggtctctgaaagaatccttcagatgatctcttggacaaaaaaaaaaaaaaatctgtatcacccatttccatgttaccatgtaattgtccagagttgtactaatgtggaattataaactttcttttcacaatctttgatcacaaaccttattcctccatattctcagtacatggctcgtacttgagatttttaaaagtattcctgcttttttatctcatggagatttataaacccttggctttcttttttctccagtctatcaattccttatgactttacttcctttcctagcttgcctgtctgtaccctgggatcataagcatcctcagtaccttactagttctccttttcttctctttaatcactgaacaaatctcaaccttgaattaaccaaaccatcgaccctgctctgtttctaatttgagagtgttaagcactattttggagatcataaaaccattacaaattcagagactccactgtcctctgtcccagtgccacttggcaaatttttcaccattttgtaattggcttcatattttattctccgtatcagcttttctaaacaatcaccattctcagaccttctaccacactctcctggctccccagtacgtagcaaatgatactgccttctattttactgagaaaaatccaaactatcagctaaatatcctcctctgtacatatattttaacccgcctttacctcctttccttcagtctcaaaagaagtataactttttccttcagtactaatctatatattgtagtttccatcccttcctacttcttcaggaacctcagtcaatcctgtattctctctttcttaatatctgactatccccttatatgattctttcccctcagctcgtcttttttttttttccccgcggagtctggctgcatcccccaggctggagtgcggcggcacgatctcagctcactgcagcctccgcctcctaggctcaggtgattgtcatgcctcagcctcctaagtagctaggattacaggcgtggccaccacacctgggttaaactttcccttaagctgttttcactgatgttgagacttagaatttccaaacatatgtagtgggaacaaattcctggatcttggagttttcttagcatccaaagtcatctttttggaacaggctaagcctcaaggagcctctgggtcatgccagataggccagatatggcgttcacctatagccatactcggaaatacagcttccctttgcttctccttccccactcagacagcctgtactcctgaccccaacacacacacaattgttactttgatgaattcattccacatttgaatgtgaaacctcccccaccttagtggggagaagcaacacctggattttgatgctctaagaggagtcccttttcctatgagaagtttttcagaagcatctcaaggattcccaagagaaacaacctcagaaacaattatcttgggagtcctacttttgttgccatagagtccaggaataacaggccagtcagcaaatagtagcagatttgtattctcccaagccctagcaaagccagtcggctttgtgggaggcatatgtgtatgcatgtgttgctgctgacctcttgtggctaataaagaaaaagccctctctaggtcccaggatggagcgtccagccagggaagggtcattgggtctattctgcttgccaatattaggcggtatgcagtgctacagaagccactgaatgccactaagcaagtaaagagtccaaagactgggcaaagtggctcacacctgtaattccaacactttgggaggccgaggcaggtggatcaactgaggtcagaagttcaagaccagcctgtccaacatggcaaaaccccgtctctacaaaaaatacaaaaattaactgggtgtggtggtgggtgcctgtagtcccagctactctggaggctgaggcaggagaattgcttgaacccaggaggcagaggttacagtgagctgagatcacaccactgcactccagcctgggtgacagagcaagactccatctcaaaaaaaaaaaaaaaaaaaagtacaaaggtttacctgcctaggaatgcaggggtacagctagcattccctagcaatcactctgtgtcctttctgtgcggggctgtataggttatggtgggattggtccagatccaccttgaaagcttggtgtkgccttactctatcctaggacctagggttctaataaagtaggatcaagtagagactggggtcaacattctcagtcaggtttctcctgctgtaggttaatgtgtgtgggggtggggygggggggcaggggtcgagggatgaaggtggctatcttggacctggaaggtggagctgggactgtagagaagagaggagcctacaaaatctccttggtattcttccagacagtttatgagacctggtttatcacatgctacagtctggtctacacttccctccctgtcctgtgcatgagtctgtttgatcaggtaagatccagcagcaagcccctggtcagcgttgaagcccctgggcccttgaggaatatccctaagaatgaagaatacagcaagagctgggctctacaaaatccagtgtaaagggaataatttccagagcggggaaaagagctcatcacctagataggtatcatgagataaagtaaaaaatcctcctcaacagagaataatcctcagttttagccaagttttcctgtatcaattttatctttgtagagagaaacatggaaattgtgctgtacagtaaattgagtatatataaaagtaattaaaatatatatggaaaaataaggaaaaattaaataacataagcagaatatgaatggaaaaaaataaagaaaagaaaatagagttattggggtaggactgggtaacgtatgggacttcaaaaaggagagactccttcagcgataatgaggatgagataagccaaagcaggagggcctgggagggagtcctgaaggccaggcatgggagtatgggtgtgatagtttatatcataaggagccagactaagggataccgtctgtccctgtcagaaattgagggtcctgggaccctacctctcccttgtcttctaccccaacctctagtcctgggcacatggagtagaaaatgagtctccaaaaaggaataaagtagctgaaataggacatcatgggatcatggctcttggtctccatgggaaatagctctaaaggaaattctccaggaagtaactgctaacctcagaacaacaagaggggtgggttgtattactcaacagtccatccagcttcagtggcctaattctagggatccatctctgaagccagccccaagctttgtatccaaagtttcagagttaggagatgaagatgatccaatgacatccactttgagtaattttttcaccttcagttcacsagtasctatgggagtgggagaaacctcacagaacatgaatacctctaaaagactaactggtccccattgatgttgctttctcccatattgacttttggcataaagaatattcaactatggccgggtacggtggctcacacctgtaaccccagcactttgggaggccgaggcaggtggatcatttgaggtcaggagtttgagaccagcttggccaacatggcgaaaccccatctctactaaaaatataaaaattagccaggtgtggtggcacacacctgtaatcccagctactcaggaggctgagacaagagaattgcttgaacctgagaagtagaggttgcaataagccgagatggtgccactgcactccagactgggtgatagagcaagactccatctcaactgaaagaactcttacacctggggacttatgtcccagctgcctcccccatctcaagctccagtcctccctcccagctacccacaagcctagttgctccctttcataactccccaattctaactccctccaagtccttcccagcatcccgaacttctcccagcttccttccactacccagatccttgcctagagagtaggacttcaggaagggtctgtggtcactgctgtgttctctggttccacttctccagtaacccataaggaagctcctaggcagcctggcagcagacctggtgaggggagaagcctctactctgatggagatgggaccttctatggagagaccctgagcctccctccttaccctcgggtgcttccaggatgtgaatgagacatggagcctccatttcccagagctgtatgagccaggccagcacaacctctatttcaacaagaaagaatttgtgaagtgtttaatgcatgggatctacagttccttcgtgttgttctttgtccccatgggggctctttacaatgcagaacgaaatgatgggaaggacatctccgactaccagtccttctccctggtggtgcagacctccttgatctgggtggtcgcaatgcaggtgtggccagtggyggtgggggtaaggggattgggtgggggcctctctgaaagagtgggaggaatagagggtgagagtgtgggaagggagcaaccttcattacataattggaggggggaggtagctgacaggtcccaggttacaggtcccataagagggtacttttcagatcgccctgaggacaacctactggacaatgataaaccatgttgtcatctggggtagcctgggtttctacttttgggtgtcattcctcctgtacagcgatggcttgtgyctagtattccctgacgtcttccaattcctaggtaaggccctgcccagtgggcggagggtggggaaccaggtatatttatttaataaatgtttaccgagaagccattactatgtgctaggctagagatataaataagacatggtctctgccctaaaagggctcaaaatgtagctagggaaataagttaccttayttgagtttccaaggtattttcaaatgtcttacgagatttgctatttatcagcatcctaagaggtaggcagtgcaacaatttttagagccattttagacaccggagggtttttttttaattaaaggacttaaatctaggtttcctggttccagttcaatgtcctttatgctgtggcatatcgccttgttgtctcccataatttttccctctctctcatctccactttgctgaagacaaaatatagagagtagatatgtagatgtagttggctcccatctttttgtttttatttttaattttttgagactctgttgctctacctctgtcgccttggctggagtgcagtggtgcaatcttggctcactgcaacctctgcctcctgggtttaagcgattctcgtgcctcagcctccccactagctgggactacagttgtgcaccaccatgcactgctcatttttttgtatttttggtagagacgtgtttttgccatgttggccagggtggcctcaaactcccggcctcaagcaatctgccggcctggggctcccaaagtgctgggattacaagcgtgagccaccgcacctggctgtctctcaccttttgtcaggccactaacttatttttctccttcaaatctttttttttctttttttaattttttttttttaccttttttatttttatttttttgttttttcctcctccaaagctttctttcccatttttggatgcaagccagtgctctaggattccctcataacttacccctgctctcctatcctgccctaccctgccctgcctttagagggagagagaggcacatggattcacagtgactttggctgcacaaaggacccaactacaattcttttgtatttatattatttctcaggagcctaaactaactacaagtcagtaacttccttctttggactagagaggtgtctacgttctggctggtaactcctacccctggtcctacccsggtcctccaggctctgtttcagcctttcccctcctggctcactgtttacaggtgtggtcaggaattctctgaaccagccgcaaatgctgctgagcattatcctcagtgtggtcctctgtatgttgcctgtgattgggcaccaatttcttaaaccactattctggcctatcagcatggacaaagtaagtgcaacagaaaatctacgcagatataattcatgaccttcttttgcttttgcctctgtggatgaaaaccctatcccccatgctctggctataggtttttgacagaattcaagagtgcaggagacttccacagcagtccccagtcyggaccaaactgaaacactcaagcactcgacgttctgcctatgcattctcccataaacaaggctttggggccctyatcacttctggcaagatagtgaagcccaggatgtccaagagaaacaccctttttttgaaaaagatagaggccctagggaaattccaaaggaggcagtcagtgctcttcctccctcgtactcatgcaacttaggaagaattagagtccctgggaaaccagcataaacctgctccttcattctcactagggactaagcctcttaattgtccagaaggctattcccagaaaggcaaggaggggtaaggaaagagcccccagatatctgccagagttgcagcatttcaagaaaaagaaaaaaaaagcaacctcaggcctgcctcccaccatctcttgcaagttttaatccagacaagcatatgtagaggtagggggtgacaagagacagtatggggaagggaaaagaagatggaacctaagaattttactttgggccctatctcctatactcagagcaagcataaaccttcccagggccctacacaaacatattcccatcgaggcatcacataaaataaaatcaaccatttaaaaaggtataatttagtgacaattacttcccatttataagcaagggatgcatgagtgctacccatagaccggatatgggccatgtckttagcgtttcttgatctcgttagataaattatctgaaattttgaggagacttcagcagaaagaagcaggggatatgctgtcaaatgcctgtggatttatactaagaaagaaagaaggggcataaggaaaattttctttatctcgattttggaggtggttacatgggtatgtatttgtcaaaattcattgacctgtatacttaagatttatacattttattttatgtaaactatatctcaataaagttgagttttttaatgtctagaaatttttaatggagttgtaagtgaccaaccacaggagccagattcacccacactgaagtaactcactatagaagagatatctccaccaatggggagagaatttctgaagaacctataaaaggacctcttgaaaacgagtcaactttagatacctgccaggcctttttttttttttttttttttttttttgagatggagtctcactctgtcgcccaggctggagtgcagtagcgctatttcggttcactgcaacctctgcctcccaggttccaacaattctgcctcagcctcccgagtagctgggattacaggtgcacaccaccacacccggctaatttttgtatctttagtagagacgggtttttgccatgttagccaggctggtctcaaactcctggtctcaactgatctacccgcctcagcctcccaaagtgctgggattacaggcatgagccaccatgcctaacttatctgccaagccttaaaattagtttatgactgtattagtcaagtaaaggctttcttcatctcttccctctcctgtcctgcttaagccccggagaaaaaagaattagcaagctgaaggagggaggaggggtaagtagaaaaacagacatctacaaagcccactgaacctggccacatgcagcagcccagctgaaagataaggaaaagcattaattgtaaaggttgaagtttttaaaaattatttcattaaatcactttaactactaaagcgaaacttaaagtgacaagtactggttgctactaaaaaggaccattcactaagtacattttgcatcagcacttgttccttcaccttgtacttttatgttatagagacgacttctttctgtaaacctcatgaacccacctctgttggcatccaacttttcttctgtaacttcttccccagccttcatagaattgaagagagttagggccttgctctggattaggttttggcttaagggaatactgtggctggtttcagcttctatacagaccactcaaactttctctgtatctgcaataaggctgttttgctttcttatttgtgtgttcactggaatagcacttttaatttccttcaataacttttcctttgcattcacaacttggctaactggtataagaggcctagctttcagcctgtcttggctttcgacatgccttcctcaataatcttaatcgtttctagctttttatttcaagtgacagatatgtgactcttcctttcacttgaacacttagaggccatttagggttattaattggcctgatttcaatattgttgtgtctcagggaatagggaggcctgaggagaggtaaagatgggaatgacgggttggtggagcagtcagaacaggcatttattaagtttggcatcttctataggcgcagttcgtggtgccccaaagaaatgaacaaggaacactgtcctagccccaacatatccctgtgattccagctccaaattatctaccaaatcttctaagattcatgaaaagcgttttggaaaagacacatcatttggaggatcctgggagtcattcaagactatttgctgtatgttaccccacccacccccatgacacattcaattaatcactaaattctacagatttctataccctaaatcatccttgaatctatctcctcttatctaagccttcagccactgccctaattcagactctttcagttctcatcataattatcaatctcctaactggttgattgattaccttcctgtaattcaatatccacactcctactgaagtgagatttctaaagctcagatatgttcacatcactcccctgcatgaaataatagtgccaacagccttcagaataaaatccaaacttagctgggcatggtggctcatgcctgtaatcccagcactttgggaggctgaggcgggtagatcacctgaggtcagaagtacaaaaccagcctggccaacatggtgaaactgggcgtggtggcgggctcctgtaatcccagctactcgggaggctgaggcaggagaatcacttgaacccaggaggcagaggttgcagtgagccgagatcacaccactgcattccacctggggtgacagagcaagactccatctcaagaaaataaaatccaaactcccaaacacacatacaaggcccttcctaatcttgctgttgcctccctcctacactttgcccatgcttaactaatgcccatactacttgagtttccctaaggcatcatgctttctttgtttttttttttttttttgagacagagtttcactcttgttgcccaggctggagtgcaatggtgtgatctcggctcactgcaacctccacctcccaggttcaagcagttctcctgcctcagagaggcaagtagctgggattacaggcatgtgccaccatgcctggctaattttgtatttttagtagaggtgggcttttcaccatgttggtcaggctggtttcgaactcctgacctcaggtgatccacccacctttgcctcccaaagttctgggattacaggcatgacccaccgtgcccagcctctttgtttgtttgtttttgagatggagttacgctcttgttacccaggctggagtgcaatggtgcaatctgagctcactgcaacctccacctcccgggttcaagcgattctcctgcctcaacctcctgagtagctgggattacaggcacctgccagcatgcccaactaatttttgtatttttagtagagacggggtttcaccatgttggccaggctgatcttgaactcctgatctgaggtgatgtgcctgccttggcctcccaaagtgctgggattacaggtgtgagacaccgcacccggccagcatcatgctttcttatgtctctgtgttttcgtatattctttgatttgcaagtgtctggaaaacttaagaaatactttgaaatgggtgtctttttaatggaatgttgggtgctgttaagaatctttgggaattatttgattatattagcggtgagagcctttgatttcctttgactaggttcctattttacaagtaagctattttctaactcgttggagttagaagttaacttcagaatactgacaataaataatacaaaagattttctgcccataacagtgcaaacgattcctgttctgggtgatgcaaataaattttgtccattagagaaaagacatttctaagtcaaatcttcatttgaactggttttagtatcttactggttccctcattagttaaataaaaaatttgaaatatgttcattgtatatttgtataaggctctgccaggctcagtggctcatgtctgtaatcccagcactttaagaggtggaggcgggtggattgcttgagctcaggagttcaagaccagcctgggtaacatggcaaaaccctgtctctaccaaaaatgcaaaaaatatctttagtcccagctactctggaggctgaggtgggaggatcgctgaagcccggaagtcgaggctgcagtgagccatgatcgcaccactgcactccagcctgggtaacagagaacctgtctcaaaaaataaaaaataaaaatacttgcataaggctcattattttacctttttgaaagttattctttaacacaaacaacaggaagtaacccacactcgctgaagccaaaaatgagattcctatgaatggatagaaggatgcatcatgatcctggggaaggaatcctgctgggcctcagaaagaagtggaaccagctgctggaaggtcccaagaacctagggagcagtctttttgtgtctagacttgcttctctgtgtgcaactgattgatcttctttctcagcaaactggttttcaatgctgctcaggccaaatgggcaagtagaagatgactactgcatagctcccaaattacccttaagtccaatttaagtctgagcagagatgtagctctttgtctcccaattccaaattcttagagaagtaattctaattggcctggtttggcttaattccccaacccagactatttaactgggggatcacactgtgcaaacatgcaattcctcattggttccccactggcaatgctagctctctccatgtcacccttatttaagcccttagaactttatttctaacattcatatttgatcttgtcattcctgcctctgcaataaagcccttcagtatctctcccaactccttagtagtcataggcgtttcatcaccaaaccctgaccagctctcctcagctgtctccgttgcctcccacacttctcaatcacattggtcattttgcccctcagttcttttgcacatgccaattctctctttacctcccactcattcttcaaaattcagctcacaccacttctgtgaagcctgaagacaagctacatatcctgacatttatctgcttccttgactgtgaccccagtctctaactctttcagtgagtatggaacctagaacagagtcttctatttttttttttgagacagagtcttgctctgttgcccaggctggagtgcaatggcgcaatctcagctcactgcaacctccgcctcccaggttcaagtgattctccttcctcagcctcccgagtagctgggattacaggcatgcgccaccacacccggctgatttttgtattttgagtagagacggggttttaccatgctagtggtctcaaactcctgacctcaggtgatccgcccgcctcagcctcccaaagtgctgggattacaggcgtgagccaccgcgtctagcctaagagtcttctcaatgggtgatatggttttgttagtggtggaagaggtctgagttaccccaagttacctgcagcctatccttatgggtctgtagcaactttagtccttgcttcatcagaagaaagaattcgactgtggggcagaaagcagaaaaagagaccaaggcaagttccagagtaggaatggaagtttatttaaaaaggccttagaacaggaaagaaaggaaggtgcgcttggaagaaacccaagcgggcacgtgaaggttaaagagagaaggtcaagtgcctaaccaagatcctaggacttttacaggctggcctctttcccatgattcttcccttagagtgggcttcccgaatgcgcagtgctttccttcccgttttccggtggagggtgcccccaggagatcatacgtcaccatttttgtctcttaacacgcatgcccagaaagttgcttctccctgaggcctgcattcaattagcattttgatgttaacatgtgtggaccatcaggaaatggcctctccctggcccagccgaattatcctttttaaagaagcaatgaggtaattatggaactgtcactggtagagggtctgactgcaagttgtccaggttcttggcgttttgaacaaagaattggacaaaacgcccagcaaagcaaagaaagaatgaaggaacaaaagaaggaaagcagggatgtattgaaaacgaaagcacactccacagtgtgggagcagccggagcagcggctcaagggccaggaaacagaatcttcttgggtccaaataccccctagaagttacccgccacttcatgctcacctcatgtaaatgaattcgtagcctgcaatcagtctgattggttgcagaaagcagccaagcagaggctgaagtgaagttacaaaggtcgcacacctgtgcaaacatctgattggttgcaagaagcaaccaatcagaggctagggtgaagttacaaagttatacttctatgcaaagttagactcggctgcagtcagtctaattggttgcagatagccaatttcccatctgctgggcagaaaagttgggtggggggtttgttacttaggtgtggaaagttagggttttcctttcaatttagttccaggaagttggcatgaaccagtcttaggttccctgcctccagtccctattctcctgcctcagaaccatcacccaacatccctagtgggtagcagggg

SEQ ID NO: 6932 - DNA, 13051 bp, Homo sapiens
atgtggttaaaactattttaacaattcaaggcagttttgtgcttttctgagaggtaaaagtttgtcactgttttagggaaaaaatcaaatgcaatgaaacagtaacacttacttagcattttaactacattttaaccaaagtatttgaattgtgtataaaggcgctctatcagataatctccacaatacaatcaggcaggaaggtataaatatctattttttctacataaacaacagctttaaaaatgagtattttttgtattaagttaaaaaaaaaatttgaaatctcaagactttcagactggtacttaaaactccataggagccgggcgcggtggctcacgtctgtaatcccagcactttgggaggctgaggtgggcagatcacgaggtcaggaaatcgagaccatcctggctaacatggcgaaaccctgtatctactaaaaatacaaaaaaatagccgggcgtggtggcgggcgcctgtagtcacagctactcgggaggctgaggcaggagaatggtgtgaacccaggtggtggagcttacagtgagccgagatcatgccactgcactccagcctgggcgacagagcgagactccagctcaaaaaacaaaaaacaaaaaacaaacaaaaactccataggaaacttgtaatccttaagattcaccataaaacttaattgagcataccaacactgacatttgatgtgagaagaaatgtactgtgtgtttaagttttcactgatgaaaagaaatgatttcggaaatatttttattactggagggacagaaaaactgaaactctgagaaagaaaattttagctcatctaaggatttaaaaaagactaatcaattaaaagagtttaatgcctctattttaggaactgattttatcagtgttgaaataaattgagcattgctgtctccctatgacctgaaatgacctctatgtaatatcagatacatttaaacttactagaattacacgactaaaaaccctagagataaaaattatttagtatcaaattgttgatgtattttggggggcatggatgatttgaacttttaaaatctctataaaaatattagtggaactatttacctgatcattcataacgatcatggtgcgggtgaagagatcatgatgagtaattatgccagtaaaccactgggtggcagagtcttgtctatatactctcactctgtatccatttaaggaataaggaccttaaaaaaaacacaagaaacagaaacatcttaaatggagacatcttcatttaataactgccttttagaagaaacatgagctagtgtataatagtaatatatccaactatcagttttcaaaaaaatgttttagaagtaaatatcctttcaaatgaatcattctgaagttactatatacactgcactagacccacatacttcctgattcaatagaaataaaatactttaagagagaaggaaggtttctaggatcacgagttaataagagaacagttcaaaatgcaaagttatagtagtgtagaatgcagtaaggttatgaagctacttagtaagattgcagtagatgactacatggttgaaacagaaagattaacttgcaacttgatgtttgtttgagtcttctagttgccaaaactttaccataaacaactataaattttgatttgctatcacagccagaaaaagttgctaaaagtcttaaaaaagagattggctaagtgaatgtatacatatagcactaaaaatttttaacgaaatatggtacacttttgtgctaaactcactttttcaaaggatattcttgtatagatatccattagaaaataataaaaaatattaaacatatttatctgcagatattcagatatgcctaataaaacaagtcactctacagaagaggatactgagatgaaaacgatctttaattcacaggtattaaaatggtatcaaatactttaacaaagaactgtaagggaaaaaactgctgtaccttaataatttacaaagtgctttcaaaattttcaagtgcttatttaattctctctcctaagtattgttagcccttttacaaaaatcaagaaagtgagaggttgacagattaggtaaaattttaagtcaaagatctgggactgaatttatttttctgatattccttcttctacagttgtaacagattcaacaatcctttgccagctttaaatatatatatataaatcaatgaactgtagaaagtattccatatgacctgtaaattaaatactttcatctagagaaaagtgaagatgttgactggctataatttaagggaggtgatgcgtaaacactgtttagtagccatatccattatatgaacttcagtcttttctaactattgaagaataagactccatattattttttctaaataatataggacatgcttatagagtaactccaaatatgatcagttttcaattcccattaacaaacagtttacactggtttgttcccactacttaacatagcttagagtcagcctcacacaattctgcatagaatgaatagggactatactgccccttaatcttttctcctctaaggatacaatgcagaaacaaaatattattttttaaaaatttgcctggtttcttcaacaaataaattgcaaggaaagggaaaaaaagagcaacaatggggatgtaccaaataatcacaatgtgtggaccttttctgaatcccttgatttttaaaaaataaatcaaacctgttaaaatcttcgacgtttataagacaaatgaaaacttgaaatacctagtattttaaatttaaaaacaattacttttttcagaataatgttccagcattgttttgttcaaaaaaatggatagaatagggtgatgtctgaaatttgatagaagggggtatggatagcacaggatcagccaagatttgatagttgttggggctgggagagaggtgaatgaaagttcactgaaatattctgtttttgtatgtgtttgaaattctccacagaaaagtttaaagaatatttagcctaggaagaattaaatatgtagatgatccactactgtacatacccatataaagcaaacagctttgggattctctcttgatacttaatggcatggaagttgacggttgagatagatatgggaatttaacaacaaaattccattcacaaagacattcaacaacagttcatgccatattgtctcactttccattcaatttccaaaaagcttgtatttacaatacatgattttactgacagaaatggaaattgctaaaaatcgtcaaaccccactggtttgaaggtcacacgttgtaacatactaaacaaaggaaacaaaagactagtaatttctgaaaaaggtgcactgaaataggccacttttaccagatacgaagaacattcttcaaaggaaatcaattgtggctgtgggcaaccctctactgcaaacaatgcttccttctccaggaaagacacacctaaagaattccataatatgcagttttctgtcaacaaaacacctgtgtagctgtaatttcatgacaggcattcagttcaaataaagttaatacacttgtgaaattatcaactttctatcaaaattattatcactctgctattattttcctggatgtatataactcaaaatattggactgggccttctatttatattgcacacaattgaataaccaaaaacaaatatgataagttgcctagatccaaaaaaatttaatgcataacttcaaaatagttaccttgcataaaaatctcctgaaccttttgttcctttacccagactttcacttcctcatgaagctgcgggttgtccctgagaactgggtttaggctgtctatgtcgtcctagaattatagattaaaagaaaggtccatgttacgctctcctaccattaatgttaccgactttccctcctatacgttctaaggactgaataaaattcctttgatctaaatgtatgcaaaaacacaaattcatgagttatagttcattggcaattgtgtaacaaaagagcataagaaattaatctgtggtaagatttgacctttgacaacaatgtcctaaagtcaaaatttgaaattaatgtgttttctaacttttaaagtatagccttattcaagtcatctttttaagggattcactattggaagcaatatacaaatgaaataacatcaggtcatttaaaggtgttggcaaaagaactgaggtgaacatttgaatgacaatagatacatacacagatgacttactgaccttcccataatacttaacctctagactttgaaactacttttattctgtcctgatttaaatgtcatcaaattcagttctactcacagtcatctgaccagtaattttgctgctaaaaattttatttcttgaaactagcgccaaagcatccagacaattaaaattacattattgatggtattactctcataacaggctggatctagacatagaaacaaccaattctctctcattggagatgtgaatcatacagtcacgtgatttcccacaatttgctggtctcccactggactctgatattctgttctctctctctctctctcaaagtacctctgctgctcctgcatttgagatcagctgcagggacactagagtagctgagaagaataacaaaccagcactgtcaaatggcaactatttttaaagtggacaggcagggccgggcgcggtggctcacgcctgtaatcccagcactttgggaggctgaggtgggtggatcacaaggtcaggagatcgagaccatcctggctaacatggtgaaaccccatctctactaaaaatacaaaaacatattagctgggtgtggtggtgggagcctgtagtcccagctactgaggatgctgaggcaggagaatggtgtgaaccggaaggtggcacttgcaatgggccgagatcacaccactgcactccagcctgggcgacagtgagactccgtcttaaaaaaaaaaaaaaaagtggacaggcagatcatggaaacccgtgaatagaaaagagctaaactaagtgaactatatctgatgaataaaaaacaatttggcaactttgaaaagccaaaaggtagctgaagtgtaaaaaataaaaaaggacccctaatcaagtaggtcatacttcactcttctccaaagtctatccaggtaaagtgtttccttctcatactgctttttaaggcactactctgtatttttagaatagtattgtggtaaatattctatctgatatgtacttaaacatagtgaaagccaacaggccaaagtaagggcctttaaattaattatgttccttggaaaatacatagaagtactgctttacagcagaagaaaataccagaatgaaaaactgtcatacaaataagtaggcaaaatctgtcattttgggagaaagaaatgggcattaacatgtctttctttactttgcaaagaaactttctagcaatctcttttctctgcaccccctcaataatacagtacacacttagaaagtcctatcagactctaacccccttaatgcacaccagctgacagtctagtcgataacaaacagaacataggaaactttttgtttttgttttttgagacggagttttgctcttgttgcccaggctggagtgcaatggcacgatctcggcttactgcaacctccacctcccaggttcaagcaattctcctgtctcagcctcctgagtagctggggttacaggagcatgccatcatgcctggctaatttttgtatttttagtagagatggggtttcatcatattggttaggctggtctcaaactcctgacctcaggtgatccacctgcctcaacctcccaaagtgttggtattacaggcgtgagccaccacatctggcccatagaaaactattttacaaggaaaaccattactattttcagatatctctgacagcaagttcttttaaaatttttctcactttaaaacttccttacatagcacttccgccagggaggtcccccatctgcagtcatgagtcatttcaagtttatcgatattgttatcaacttgactgacaccatgttcagaggaatttataggggggttcaaaagcatcaagatgatttacaggatgtaacagggagagctgtcgagattggtgttaaaaagtttatgattacaggtggaaatctacaagacagtaaagatgcactgcatttggcacaaacaaatcatatgtttttcagtacagctggatgtcatcctacaagatgtggtaaatttgaaaakaataaccctgatctttacttaaaggagttgctaaatcttgatgaaaacaataaagggaaagttgtggcagtaggagaatgtggacttgattttgactgactgcacttttgtcccaaagatactcaactcaaatactgtgaaaaacagttwgaactgtcagaacaaacaaaattaccaatgtttcttcattgtcgaaactcacatgctgaatttttggacataattaaaagaaatagagatcggtgtgtagagggagtggtgcattcatttgatggtaccaaagaagcagcagctgctttgattgacttggatctttatataggatttaatggttgctcactgaaaactgaaactaatttggaagttttgaagtcaattcctagtgaaaaattaatgattgagacagatgcaccttggtgtggagtcaaaagtacacatgctggatcaaaatatataaaaactgcatttcctaccaaaaagaagtgggaaagtgggcactgcttaaaagacagaaatgaaccctgccatataattcaaatattggagataatgtcagcagtgagagacgaggatccactggaatcagccaatacactatataacaatactattaaagtattttttcctggaatataattggtatatgtcttccactttccatcatgtatgtaaaatttcatagtaaaacttaccgatagtttcartaaagaaattatctgcaaaaaaaaaaaaaacccaaacaaacaaaaacttccatacataaccatccatataccttttccataatatagggaattataaactgttttttctgtgctgttttttttttttttttctgagacacagtctcactctcccagcccgtagtgtactgggcacgatcttgactcactggaatcttcgcctcccaagttcaagcgattctcctgcctcagcttcctgagtagctgggattacaggcgcataccaccatgcacaactaatttttgtatttttagtagagacggggtttcaccatgttgaccaggctggtctcaaactcctggactcaagcgatctgcccaccttggcttcccaaagtgcagggattacaggcatgagccatcacgcctggctataaactgttttaaagaagcattgccaacaccgtgcagacaagtacaccttataaaaccagttgactgtgttggaattttacaacttataactcatttatttatatcttatttattcaacaggttaaaataatgggctataaaaccagttgcctatgtttaaattttataagttataactactaggatatataatctatttcttcaacatttatttataaatattttttgttttgttttgttttgagatggagtctcactctgtcgcccaggccggagtgcagtggtgcaatctcggttcactgcaacctccacctcccgggttcaagagattctcctgcctcagcctcctgagtacctgggattacaggtgcccaccaccaagcccggctaatttttgtatttttagtagagacggggtttcgccatgttggtcaggctggtctcaaactcctgacctcttgatccgcctgcgtccgcctcccaatgggattacaggcatgagcctccgagcccagccttataaatattttttcaacaggttaaaataatgggctctatttccaagatcattaaacaatatacaaatatttttccaacaataaaccattaattatctagcggaaatagcataccattaaaaactgttaaattgagtccctttactgataatgactttatgtaggttcaaactctggtctctcaatctcctcatctataaagcagagttactaatatttccctctttttctatcttaataaatgttttaataagattttttcttatgtacaaaaattagctttcttaaaatatctaattctgatttatgacatttgagtgctgaatgatgtgaactacctggttaattaaaacccacaaaaagtatcccaatgcactgcctgatttatgacaggcattgttgttgaattcctccccctcgtctacatatagtactttgtaagttacagggatttctgttacatcatcattcccattttaaagaggattattaaaggttaaatgagcaaatcttgaaacaaagccaaataggttttttatatatatatttactgacttgaataattttgtaaaggtgctaaatgttagacagaagtcaacaaggctgacttacagataagagaaattaagggtctggaattaaaaactagctatgaatatccactatctttcacagaatttaaaaggtcttcagctgtgccttgagctcgtgtgagattaaaaatccacttaatgggccgggtgcgatggctcacacttataatcccagcactttgggaggccgaggtgggtggatcacgaggtcaggagttcgagaccatcctggccaacatggtgaaaccccatctctactaaaaatacaaaacctagctgggtgtggtggtgggcgcctgtaatcccagctaccagggaggctgaggcaggagaatcgcttgaacccaggaggcagaggttgcagtgagccgagattgcaccactgcactccagcctagagacagagcgagactctgtctcgaaaaaaaaagaaaaaaatccacttaatggcacagtcttcacatttcacactttaaagacagtaactataagtagttacctatatatagttcttatcttgaataactaatacctattaatttttcaaaaacaagtcacctaagctaattgaagagacaggaccctctatgaacctctcctcctatgtaaactgtatcctatttgagctactagttataacctccagcaaacgacaaatggaaaaaaatcagttcactaagcatctgctttattagaaatgtatacagaacacagaaaaagttcaaaaaacatcttaaatgaggtttgggggtacatcagtcacttgtgtgttgttcctcctcttgcaaagatagacatgaactctaattgaacattagtgagacaccttaatgtactgatacacaaaaatagctaccataaggccaggcgcggtggctcacacctataatcccagcactttgggaggccgaggcaggtggatcacctgagattaggggttcgacctggccaacatggtgaaaccccgtctctactaaaaatacaaaaattagccaggtgtagtgacacacgcttgtgaatcccagctactggggaggctgaggctggagaatcacttgaacccgggaggtagaggatgcagtgagctgagatggcgccattgcactccagcccgggcagcaagagcgagactgcatctccaaaaaaaaaaaaaaagctaacctaaaggtgcatttactatggcagacactatgctgggtactttccatacagtatcaattgtaacaactttgtgagctgatatacacagtatgttcagagaggttcatggttacaagcaggaagtgacagagctgttatctgaacttagttctgtgacttccagggctcaggttcttctcccccacccccccttccctccacatacactctctctcattagcacaatcaaaagaaatgaaagtttactattattgtcttttaaaatttgacacatttctttatatgtaaggggtaaaaggcaacattatcttataaactgaggctgactcaaaagcaaagaacaacgggtggaagatacctttctataaacttctaacactggttatgtgacattccacatatagaaatagtcaaatactcatcaaagagaggagacttagggtggcaaactcatgcaatcttataatcagaaagtgtaaaagagaagaaacctcactttggtgatgtaccttagtcatgatctacaaatacccaaatgctgtttttttctaggttaacactgtgctgaatgactgcttggatgatcaaaataaaggtattttttcacgtgtacaggaggggataatggggccgggtgcggtggctcacacctataatcccagcacttcaggaggccaaggtgggaggatcccttgagtccaggagttcgagaccagcctgagcaacatggcgagatgccattgctacaaaaaatttaaatatcagccaggcatggtggggtgcgcacctgtagtcccaactactcgggaggctgagatgggaggatcacttgagcccaggaattcaaggcagcagtaagctataatcgtgccactgtacttcagcctgggcgacaaagcacaaccctgtttcaaaaaaaaaaaaaaaaaaaaaaagagagagagaaggacatgatggagtaaaaggctgaaatcaggccgggtgtggtggctcatgcctgtaatcccagcactttgggaagccgaggtgggtggatcacctgaggtcatgagttcaagaccagcctgaccaacatggtgaaaccaaacctcatctctactaaaaaatacaaaaaaaatgtatttaggtgtagtggtgcgcatctataatcccagctactcgggaggctgaggcaggagaatcccttgaacctgggaggcagaagttgcagtgagcctagattgtgccactgcactccagtctgggtggcagagtgagactctcaaagaaaaggttaaaatcaggctggaatgtgtattttgacagtaagactactgtactaacataattttaggtgattatgtactttctacttaattcgaaagaaaaaaataaccatctaggtaatataaaacataagctcagaacactaaaatattcagatatgcctagttaggtttaatgacaccagtattatgaaaatgttaaaaatatacacaactcatttcctaagataataaggtagagtgctccttgccagttcaagaaatatattatttatgtcacacatagtctcatttgactgctgacaaaaaaccaacaaagggtggttagtttctaagtgacagagaagactggcttaataacgtaacagatttgctcaaaagtctcaactgatgtctagagtagcactttcattttaggataaaagaaatatcacaaaactgcagcagtttctcctcctttggacaatttctgatagataatgactgaatgctcactttcaaattgatactgatatgtgtggcttattaatggaatgattttcccctctgctataaaacccttgacctttgtggtaacatccagtgtgctttcttaaattccattccatgacataaatttctccataaaaaccatctttgatagtataagagttaccataaaagcaattattttgtatcctgaacatcagattaggtgattgaacatgttttgccataccagtttcgccagtcataaattcatggtttagcaaaactacaaatagttgcttgttcttagatccctgagattgctggcaacagttttaaaacgtgaatgttaagtccacaagagtgacattaatttttaccacaccacatctttttaacttataaaagaatccattttgctaataaggatttgctgggacaagaaatatataaagtttgaaagttgctacaggggtgctcaaaaagcaaagctgtctataccacctgcagttaactaaatgaaggtaccgctgaaggcttccatgtattttcatgaattataataagggctagcaaacattttttgtaaatggccagaaagttaatatattaggctttatgggccataccagttgtcacaactactcaaccctgctgttacagcagaaaagtagctaaaaaaataccataaaaatacataaatgaatgagcatggctatgttccaataaatgtttctatattagcattctatgaaatttgaatttcatagaatgtttaggtgttatgacatattcttctttttgagtttttttcaactgtttaaaaatctaaaagtaactggacacagtggcttgtacctctaatcctagctactcaggaggctgaggtgggaggatcccttatgcccagaagttcaaagctacagtgaggtatgatcactgtagtcactgtactccaccctgggtgacagagggagatcctgtctctaaaaaaattaaaaaggaaaagataaaaacaagaagcaggctggattagcttgtaggtacagtttgccttttcctaattaaaaacaacaaaacagaacaaccagtatgaagcaagattaaaaacttctacatcaatgtatcaaatacaattttaaatatactaatgcaatttgatctaactgactgcaaactcttatttccacaaatgcttgaaatatatacaatcaggagcacaggaaattaaatcaataccaaatccttttcaccagtaaagacaaaaatatcttaaggtaaatacattatttaaactttcacaagtaaatgagtttccctgatttattctggaaaatgcttagccttccaaatataacaatatacttgattttaatgtacataatttaggaaaaattatctaatttgcaagataagatttcctccattaggtcaatgactattacattcagagattggaatcatcatcttctctgggctctcaagtaaagtaaaaatgagaatatgcattaaaaagtaagagatattataaagatagtctacctgatttattaaggacacgatagattaatctcttaagctctctatgtaggtgtgtgtgtgtctgagtacatataaata

SEQ ID NO: 6933 - DNA, 15392 bp, Homo sapiens
atgacatgttttgttgtccatcttgtattattaattataattctttaatgcctcaattcactcactgatcagcaagctttctgagcaaagaccatctctgaatgtcccaatgctttacatgttaaaacatgattgaataaatgatgccctataaagaataattgagtaaatgttgtcttttcttcagtgtatggggaatggtcaaaccatcttatcacttcgtccaataccatgctctcccttgacctccctactccggtatgctccatatgctctcccttgacctccctactccagtcacactggcattctttcagttcctcctacttgttttgttcctcctgccctagggcctctttgcacatggagtttcttctacctggaacactcattccttcccagaacatctagttaacttcttctgcttcttgagattgtaaatcagtcatcatttccccagtaaaagttttctgttgtccaaactctcctggtaccatgtacttctcatctgtaacactcaaggcaggtgctcctttacatctatggacatgataatttggttaatgtccatcttcccatcaaaactgtaagctccaggagaacagggacaacaagaaaagtatccactttaggtcagtattatattcttctcacatagtagatcctcaataattatttgttgagaaaacaaataaatagctgagtatatctgtgtgcatgtatgcatacagtctacttgagtttttaagcaagcctaaagtaggcaataattataatctctaccattcctgtacctactatgtgataggcattgagcacccttcttcttataatctatctcatttaatcctgaaagtgatgttatgagttagtaatcatcatccttgttttacagatgagtgaaaagattcagataagtaactctgcccaaggtcacaaagttgttaaatagcaaaactttgatttaaaaccatacatgccaaaattcattaaacaccatttcagtattacaaaagaaaaccaaacagatgacaaacctgatgctcaaaaacagtttaaactcgagctagtagttccacagtctaaactgtggctaacgtcagtacgcttagatattaaatatggtgaccggcaatgctacagaaaggtgagagcttccaaccaaatgtcaaggaccacctgtatagcttctagaacagctgtgtgacctggtctcctgactggcttgaaaaatgaagccttatatgaacctcaggtctcatttccatttccgttggtttgattttccaatgtcagttatttttacatgtgacctactcaatatttctttatctaaaaacttttgagggaaaaaaatgacatgctgaaatagaggtgccatcaaggctcctggtttcttccaaaacagttagtcaacccttttaatttacttgcttcagtgaatgtcctacagtccacatcaatccacagtgatgaacagaaaagtaacaaacagtgttttccatggaaattactaagaatcatttacagagaaaatcaaaacaatggtgttgagtcccataataatgctgagctacatagtttatgaaaggtagaacaatgggaactcaagttcacattgactaaaactccagatctagcataatgttacctcctctacagcacagagtagaatggttctgcttgtacacctgaattatttcagtgaagtggtaccatcttcctaatactgtctgtgtaaccattcaatattcctgtgacaagatttcacctcttacataacatttctatatacgctacctcatctgactcttacaataacacatcggtagatgaagcatgtgtaggtattatcaccatttcacagatgaggatgttgaggctggtacagcaatggcttcactcaaaggctcacagctaataaggtaaagagctgaggctggaaccaactatttacctcctatgctctctccattaccctttcctacctcctaaccacacactcacatagggaaatacagctaagagttttcacactgggagctcctttctaaatgactatcaaggaattactcaggagaatgtaagtgaggaatccataagagtgcctgatgggccagtgatgttggttactgcatttctcaagtctgcaatggaaggtctgtaatcagtcctcaaagagttttgaactggaggagccaatttttatgctggtatagcgtgtgagcagcctgtggcatactgtaaccactacatgaggagtgttgttaaatggctatatgtacacttaggtgtccagggcaggctggtatcctttaagacttcatctctactagtagggtaagtaacaataaaattagtaataatagcaatgatgataatgacattatattgactaacattagctttaatactcacaaaaatgtacaaaatatatattattagccccatttttcatatgggaaaactaatgtcaagcaacttgtccaaggtcttactgctactaagtggactgttaagatttgatgttgggttgtcccattttaaatcctttctaccttataatataatacctaattaataatacctctttttaacctaattaattcaattgggataataattcaaccatcaaatattttagcctccatatctttccttttccattaaactgtctagctctgtgctgtccactatgatggccacatgtagttactgagcactgggaatgttatgagctctaattgacatgtgctgtaaatataaaatacagtacaaaaagtgtaaaacaactcattcataaatgataatattggttacatgttgaaacggtaacactttggatatattgggttaatataaatatattattaaaattcacttctttgctttttaatgttactaaaaatttaaaagtacatatataattagacagcactgctatagattattattccaagattcatctactttatccccacatactgatctcacagagaaccaaccagtatgaaaatgtttttgctgttgaattattctcatggctcatgagcctataacataagatatcaaaacactatgttctatagtatatgtcagactgtctttattttttaccataatccaagcaagaaaatatgtcatattgcaaacccagaatgacctggtattcctttatcatatatatactatatttagttttacaactttatgaagtaaactttttacaactttataaacaactttatgaagtaatagtacttccccttacagatgatactttctcttcaattatctgctgttctatttttttgatgttgtttgtaactcactaaaccaacttcatcactcactaatgtgttgtaacccacagtttgtaaacacaagagtgtctgcaagtgagataccaattctatctacacagaggtgaagggatattttagcaaataataagatggacctggcactaatgaatgagctagtggaggcctgtaactatagcaggatctgtggcctattcagttggcaaaactgaagggagttcaaaatgcttcctctctcctatagagtcagcactaatggacctgtctaatgtccatctgttgttctgtctgctcagcattaccctgttcttataaggaagagcatgtgcttcttttggtacctgctcttcctacccagcccccacttccccccgaccagctccatccatgaggttcaaatggaagctcccatatgttataagccatgtctgatggctcataggtgggaacccaacccaagtgagaccaatcagagcctgttcatgggatttatgggcatctaactagaacagggaaaagtccgtcttttctgatgataaaatccccaaagtcttaacttggaatctgtcagtggttgtgtcctctgcaatgtggaagaattgctttaccataggagagagtgaaggaaagagaagcagaggtgaaaggcacagagaggtcaatgggcccaactccttgcagggccagcttcatgggcatgtggcccatgcagtctcataaggtcccgtacttggtttaatgttctgctgtggccatcttgaagctctcaatcattttcaaacaaaggacactgcaaattacataactggtcctgaggcgttggttccaatatttccttaaacccagtgggatcctcacccttcctaagactgaatcattcagctcttctttagattatgtgagattcttccaacaaattatctttcatgttaagcttcttagaggtagattcttttacttgcagccaagaaactggactacactgtggtcaaagacacaagatgagagaaataacacaattctagaggctcccagccccagtgcatgcccaaaagatagagttctgtccttgcccctgaggtttctgattttttcagaactgcacctgcagggcctggatatttcccccagagagtccagaaaggtctttgtgctttagaaagaacacaggctatagtggttggtatcatttagagaccaacactgattttaggcatcttgtaatataatttaaggtggtatccttaatattgcaaattcaataggcttatatgcaaactgtaccatgctcatttctctgaataactgaaaagcaagcaaataaatgaaacaaaaaaacattccaatataacagtctaattgggaaagggggtttcatttgtgtaatgcccataatcagctttaaaacatatccatggattatcatttgtttatagaggaaagtaaaatggccagacttaatgataaggtgatcagtggcttagttttgctagttccagcatggttatctttagactgatattttggctgaactatagaacacagaacttgccaacattttttaaagcgaaggagtgtttgcatctttcagtttgatgtagtggcctgaggttcccccaagtccctttgaactgtttgctcttgaaccacatttgtttcttatgcatttggagtaattgatgcgctccgaaaggaagaaggaataagagggagcatgtgagattagtcttcaacagaaagaacaaatctagttgaaacaaaaggagaaaagtgagatcatccagaggcgactgtcactctcaacacacacaaaaggcttctttgggcacattgcagaccttcccccaaggtattctgcagaatagccgccaggcaccaacaacaaagatgtgactcgggcatgagatgatggataagagggaacagagtaacagaggttgtgttcttgagacctgtgtcatcttgaaaaacgccctgaattcagcattgtttatattcctcgggaatatgttagtgcctgtaggtgatccatgtaagaaattctgcgcggtatctgcctggtctcttacaaacactctgaatcctacgtcctgaaaaaggtacagaaggatgtcaatcccggcttcccctcccagggaatcgtggaaaacatactatatcaatgccttgatgtgtcaccttgtttcatccttacactaggtctgtaaagcaagtatacagtgtccttggttgcagttcagtcattcggcgtatatttattaagcacatattgcctgtgaagcactgtgcttctgggatactgcagcgaataacacaggtgcgatcccttctcctttggggtttactttctcagagaaaaaaaaaaaagaaataagtagataaaataattgccagggaaattggggttatcatggaaaggtacaaggagtttgagagaaggaaaaagagaaggggcagcccagctttccacctctgcctctcccgggcacccccaggctccattctctcctccctatactcctgcccagacagcacccacctccccttccgcccccttttccctccttctttccctcctctctccgctccctctctgacctgccgcccctccctccgctcccctgcccttttgctcgaccagggcccccgggagccctctacccccaccccatggcccaaccgtccgggcacgagccccgcccgagctcaccgcccctgctcccctctccgaccctttgagccgtggccgttgccagatgtccacaatgggaaacgaggccagttacccggcggagatgtgctcccactttgacaatgatgaaattaaaaggctgggcaggaggtttaagaagttggacttggacaaatcagggtctctgagcgtggaggagttcatgtccctgccggagctgcgccacaacccgttggtgcggcgagtgatcgacgtcttcgacaccgacggtgatggagaagtggacttcaaggaattcatcctggggacctcccagttcagcgtcaagggcgacgaggagcagaagttgaggtttgcgttcagcatttacgacatggataaagatggctacatttccaacggggagctcttccaggtgctgaagatgatggtgggcaacaacctgacggactggcagctccagcagctggtcgacaaaaccatcatcatcctggacaaggatggcgatgggaagatatcctttgaggaattcagtgctgtggtcagagacctggagatccacaagaagctggtcctcatcgtatgagcctttttcttacaagcaccacccaacaacttctgctttcttccctatctctttcaagatttgctcaagacgtccaactgtctctctgacttatctggaagtatttctttttgtgaagccatatgtcctaacaggagcttcatcaccaactcagtgctattaattctscttctctgaatgactcagggtaccctatagggggaagagcaagtcaaatgagcatagtggggaaagaaaaggaaatggcttttrtaaacatcttttactttgttttgattcaaagaccaaactagaactttaaaagttcaaaaataagaaagtatacatttttgctgttatttctcatcattttgtatatgggaggaaatttataatttgcatgggtgttaggtgaactgttttcatttgcttgtgttcagatatcttgccagattgttaacttcctattgtagcaacagggacaaatatatttgtctttgctgggcatctcgtaatcacttttcttaggggacagaatcccatcttttccttcggcagattgcagccccattccccacaatgcatccagaaatcgctgtgcatgtttgaggggtaggagttcatttggcctcctcctgacttgttgctccagctcctgaacagaaactagcttcagggctcttataggaaatgctaagcctggactaagtgcccagctcagccatcatcctcattagcagtgggtttccagggttggcagcccacaccagcattaatttcaatgaaggggacctccagctaaatagggcaagcaaagtgttctcccagaaagtgctctcacctccgacactggtccctacccccaggtggagacaatgagacatttagttagttgtcctacggaggagaggcagtagagtcaggctgcagtggaatctccctaggatrccaaagtggcattatgtctgttgctcacagatgcagagactgacaattgtgtctccacagcagaggtggatgctagctacaccagctatgctgattttgaaaatcagatctgaggcctagaagagaaactgagagctctctcattccaggaagccttttccctagtggaacattcagtgcagaagtcctcacacactaacagatctccaccattgggtgagccggagcctgtggttccaggggagatccagaatgcatgtgtctcttcccacgcatttatgtcatgttggtagctttagatcagccatrgtgagaaaagaacaaaagcttttagttgtttttgttttgttttggagaatttgtttaccagtaaatacatcactgcctgtaccccaaatgttaccagctccctgaggtgtcccacatactattgtgagttctcagagcatgaactgtcctcagaagagcagggctaggacttgtcccagcatctgtgcctccataccaatcctctttctcacagagaaccacttcccatataagatgcttaaggctctcaaaacagcagaacaatgaaacatactctccctacacttgcttagccaagagataccactcaggtaacttttttcaggacatggaagatctgtttcaaggagatttactgctattttatttggaagaagctggcaactggtcttgaccaaaatagaaaaaaaaaaaaaaagtccacaaatttaatcacttgtagggaacccatctatcaaggtaccctaccatatacttttgtatttaatagattacttagaaaccacaaaaataggaatccttaccccttcaattcctgttcaaccctaaaaactgtgataaacgctcccaaccctgtggtgatcagggttatgtaatgttcaaagattcagacacacctgggtttggattcagttgcaactgggttgttatcacactcacttctttttagctgtgtgagcatgaataatttacttagcctctctgtgtctttccacctaattaaagaggatccaccccagggttattttgaggattcaaaaaggcatgcaacacacctggagcacaattccactttcattcaactaattcccttcccttcccccttcttccccttctacaagatcaatatgtaaaggagacatgaggcttactggttgcttttgaacacttacttagttcttagctacacccactctaaaattaactggacattagtgtacagcccatgtccaagcccagagagaaaacaatgggaacaatttcaaggtcctcaccactccttcatttgcagaggggacaacagactttctgacctgagaactggagaatttttaaaacaaaatctctcattccagcccaacctatttaactttttgtggaggawttttacatggaggaagtgagcacatgtcatgctagccaagaggacattattgtcattaaagagaggcattatttatacaccctgcaatgtgcacattaaaatatggaaattttaaaattatgaccaagggcttgaaacatattggattacatgctcacatttaacaaagagaggaaatgtgtttcagtttctggagtggctggaatttacaagctaattgttcaataaatctactcaagatagttacctaaggctttgtggcaatgaccttgaactgagagcctgtatctggatttagcacttgaaagatctaactggatatttgggttaaaagaatcacatttattcccaaatcggaatgctttgtttttcctgtcagttaattgccagttgccaacaaatctagttctatacagtttcttgggatgatgataataaacatttattgagcaattgtcccataacttttgatataacctttgttatacatatcatttaatcatcataacaacactgtgagtctggtgccattatttcagcattacagatgatgccatgtagagatctagcatcttctccaaagtcgcccagctggtaagtggcaaagcatggatttgaaccaggctttctgaccccaaatcctgagctttatttctacctctctgcatttatcttatttttatagctcctatatctacctgttacaaattatttattatagtcttaaccatgtcatcaaatcaagcctcagttttcataaatgatgaaactgaagcccaaagaggtaaattgcttgtcaaagaacaagcagcctccacctctttggttctatgcattgcaatgaaacagatatgttagacgagacagttttaagccatgttccacctttggctcatcttgagaaacaggtgacaatatttagattaaaccgataacgcaaaccaatatgctctgaggctatagagatcagtcacaatatgttgttatgaatcctatgttaattggattatgtctgctctgtaccatatgttgcaatccccagaccactagacactctttttgaaacagagaaaaaaatatggcctcagcaaattcaatttagctttggtgtatattctctcatgctttagaaacattctcaaggaaaaaatatcttccagacatttttgttaattacaaattcctaagccactgtctgaggaacagtatgaattttttaaatgaagacaattttttatttaaaaaaagtataaattccattctctacttatagtactgactctttctttctgttaagagatagagtaggtagttagtctgctatggtgttatatctattttgaatactttgaacaggaggaggctcggatgtttttaaaaagagtgttggccgggcgcggtggctcatgcctgtaatccccgcactttgggaggccgaggcgggcagatcacgaggtcaggagatcgagaccatcctggccaacatggtgaaaccccatctctactaaaaatacaaaaattagctgggcgtggtggcacgtgcctgtaatcccagctactcggaaggctgaggcaggagaattgcttgaaccagggagacagaggttgcagtgagctgagatcacaccactgcactccagcctgggtgacagagcgagattccatctcaaaaaaataaataaataaataaataaataaataaataaataaataaataaatagagtgtcattatggtagaggaacaaggccaccagactgagaatcagaccggacttctctgctgccgtgtcaactaccgtacctaccccagtagccaatgactgtgaactataaatcatgaatcatcaggaattagctgattcataatgaaaaattctaacactgaagggtcaccgtagtagcagtaaagctgtgtagatcagaagacagtctgactactcacaggctaactctgacctacaaatgtttgctttcgttgttactggttttacatggtgtttgttctcacaatgttttttaaaaattaccaatattttaaataaaacctttaaagattttaaataaaaacctaaattactacaaagaaatgcaggtcactctaatatggaggtagctttttattgactaaggagtctctgaaatattgagatgaaattaagagtttcagtgaagaaaaattaacatagttacactctttggcacagaagttcaaaatggactgaagggttcactattttttaaagatataacactggacacaaaatatttatccccataatcaatatgttctaatgcctgaaacagtagaaaaatgtacaataatcaaaataagtatagctgtgtaaaacttcaaacttttatataataaaatataacaaaacaaagaaaacataaaaagggagaaacataacatgttagcaaaagggttagcagtttttcaaaaaaaagcttcattgtgtctgatatgcataaataaatatgcaaaaaagtcattatatgattcattcaaaaggagataggtaaaacaaacatggaaaaataggcttgctaattcaataaatacaaattacaatatttaaaacaggaaaaatgaataattataaaacagttggcaaaaatagaagccttctaggcattgcagtatctttggtggcattgggaatggctttcaccctttttatgggtcattttacacatcacaagtcatcagaacagttgtatcctttgaccaggtaatctcactcattgcaatgtatatctcaaagaaataaaaatattttaaaatgctatacatggccaggcgcagaggctcacgtctttaatcccagcactttgggaggccgaggcaggtggatcgcttgaggtcaggagttcaagaccagcctggtcaacatgctgaaaccccatctctattaaaaaaatacaaaaatcagccaggcgtggtggcacatgcctttagtcccagctacttgggaggcagaaacaggagaatcatttgaaccagaaaggcggaggttgcagtgagttgagatcgctccactacattctgccctgggagtcacagtgaaacgccatctcaaaaaaagaaaaaaaaatactatacacaaaatttttattgtagcaatatttgtcgtatataccataaattataatatttaaaaaattaaacaaccacagtttgggagtagtcaagtcaattataacaaaaacaataggtgatagtattaggcaactaaagttaataaataaaataatatttagaaaataatatttttagaaatattaaaatagtttgttagaaaataagttcttttaaaagcataatgcaaacttgttatatcctatgtttagaactctgaagaatatgtgtgcatatggtcattgttcagaagagaaaatggagcattgaaagtaattgttttatagtacaaggattatgggtaatctcacatttagtttttaaaaatatttttctgagtcgttttaataataaatttttcaaaaaactgcacaacagagctaatgtggcaaattaagtacaatttcaaccctaaaagatggtcgcccaagcttaaaagaaatgggggctcaagaatcccaagaaacagggagagagaagcatcttcacagcaacatgggcagtgccatgttgatgagccactaagcagtttccaggttagaggaatgcagagagtgctgtcaaaatccttgtttatccaaatgtgtgagcactactcaggctcatgcagtgtctccctggattttgtgttaataaattatctcctcttctgtttcttttgttaagtgtgatctttcactatgtcttggttaatgagaaacttccaggttctctgaatgaatcttttttctccctcttcatgattcttgttaaatatatatgttttaattccaaatgattgcaccgcacaatcttacctaactctcttcaaccagactctctcacctgggaaactctgtctttggtacatctggagcccacatttcatgtggatatcattctcctacttctccccaacaaggggccatatgtatagacacagcaatgaatctgccaagttcttttgagcaactaactattcttctgggcaaaataatcaggaggcaataaataaataaataaataaataaaatagataccaggtcttcaaaattagaaatagcatttgcttcttccttgtcctgcttccaagcatctatgagtcatccatatttcagaagcaccacagcctttttcttttccttacctctcattaaaatcattatttctccccctgccaccagctctcttattaaggaaaaaaattcttgaacatcgcatttggctgtgcagatccagagaggagatgatacaaagcttagtgcattaggtcactgaaaaatacaattattttcccaggttcttgcagtcattttgctctggggaaaaatatttaatagggaatgtcagagtaaatgtaattaagttacttttcagacatgtgctttttattttttattgaacttactatatactaggctgctggagacaggcaaaagcaacacagccttaccctgtcagagaagacttcctaaaacaggctccacccgttcatttctgagatctgcgtcaggatacagtctatctcaaaagaagttatattcacacctcggagctagaggaccttaatcctttaaacagtacatatattgaatcagattatttggttgcaagcaacagattttttttttttttttttgagatggagtctcgctctgttgcccaggctggattgcagtggtgcaatttcagctcactgcagcctctgcctcccggattcaagcaattctcctgcctcagcctcccgagtagctggaactacaggcacctgccaccatgcctgactaatttttgtatttttagtagagacagggtttcaccatgttgatcaggctggtctcgaactcctgacctcagatgatccacttgtctcggcctcccaaagtgttaggattacaggcgtgagccactgcgcccggctgcaacagatttttaaacttaagcaaaacctatcaaaagaataacgggaaagctcaatgttttgaagtaagaaagagagtgacagatgaagcctcgaaccacagcactccaaggatgctagtgcaggaactaggggactatgtctttggggcactgacattggaaatgactcatctccaaacacctttgatatccagtgtttctgtttcagattcacattgactggccttgagtctcatgctttgcctggtgaacagggagcagggagtctgtgattggtagatacaccaaaaccacatgaagcaggaagagggcagttccccaaagaaaggatcctaagaaaacaaaatcaatacattcctcctgaaatttttgcattcagtttccagtgttttacttcagtaatttaaaaaattttttgtcccagtttcaacagtagatccctagattggtgaatattagcatgatcaggtcaggctagcaaaactgggccttgtttcctctccttttaattgagaatgtccatctccacccttctctcttaaacaactgttctaggaagcttctgtgatataatgagactgtttgggatcgggggtgggggaaattatgcaaatttattttatacaaaaaatcctagttttcatatgctttcattcattcatttaaaaaatattcaccgtgctgggcactgttctaaacaagagtatgtatcgagcaaaatggacaaaagtgctgccctcctgtagcttacattctactttgctggggaaataggcaataaacaaataaacacatactatgtcaagagagaaataaagcaaagtaagagagatagattgtatctgaaagaggatggaagggggaaaagaatttgcctttttaagcacagtgattagggtaaacttcatggataggtgacatttgagaagaaacctaaagaaagtgagggaaggagcaatattgattcctggcagaagagtttacaggcacgaacagaaaatgaaaataccctcaagtggcaagttgctcaatagatttaaggaacaataaggaagcccaaatggctgagcaaagtcaaccagcgagagagaagaaggatatgaggaaatagatcttgtgaggcctcatagcccattgcaaggactctgaatttactccgcaagagacagaaaaccatgaccaggcattgagcacaggagtgacatgacagtcattctcactgctgtgaagaagacagaaggggttagggaaaacaactaggaggctgtctcaataatctaggtgaggtgagaggggatggtggcttggatcagggtggttggtggaggtggtgggatgttgaattctggatatactttgaaggtcggttccaccatatttgcagatacacagggtaatgggatgctag

SEQ ID NO: 6934 - DNA, 13497 bp, Homo sapiens
ggagtagagggtatattttgtcttccaggaacatttggcaggatttggagacattttggttgtcacatctgagataatatcattggcatctactgagcagatgctaagcatcctacgatgcacaggacagccccccacaacaaaggattatcctccaaaatgttaacagtgtcactgagaaactctattcatgaggatattctgctctcccaacaatggccccccaccccgcccatcagccccaatccattggaaatcagtgctacacagtttaggtcacaatgcagagacttatgcgagatcccctgaaaaacttttgagaccccagaaatcttttttaaaatggtgaatttcattaaagagatagaaaaggagaagattagaactgacaataaaggaaagtaagtatgggcaacaagggtgaaccaaaaaagggatcaaaggaggctgaggcgctgagtgacagcagcgggaaatcaatgctgcccctcagtggacgcagcccatttgtaaagagatgataaacccatgaaaaataacaggcacaaaaaatgaaaaaaaaaaaaaaggaaaaatgaataaaggaactgtgtagaaatagctttaggattcatcaagtgtagatctggatgaaaaaaggacattagagattcttctacaaaaggatgcttaaataaaaattctccagcaaagacgacaggacttctagaaggagatcaataattatatcagaaaggaaaaaaattttaagtatttacaaccctctactcctaatcacccccaagataggtgggtccagaaaaatgcaccttggttttactgaggagagatcatgagagggaagggaaagtggagaagcaatttcagtttcatagcaaagaattctttttttttttttttttttttttttttttttttggagacagggtctccctctgtcacccaggctggagtgcagtgcagtgatgcaatctcggctcactggagcctcagcctcccaggttccagtgattctcccatcccagcctccagagtagctgggattacaggaacgcgccaccacacccagctaatttttgtatttttagagacagggtttcaccatgttggccaggctggtctcaaactcctggtctcaagcaatctgcctgcctcggcctccccaaatgttgggattacaggtgtgagccactgtgcccagtccatcatctattgtctgtaataatttagaaatctggcaccaggattatgaaattcactatacagtgtgtggcataacaccaagcttaaatggtcactcagtggacttcacaataatggccactttatgcttctggatgcaaaacgttgggagagtttgaagtggatatgaatttgagaatgcgttttcttgtaggaaaagtaatggaaacataagcatctttttctaatcacaggaaaggttaaggctttggtgaaagcaagcataactgagtttaaaaacagtctagaataagaaaagggtaatagaagaggaaggaaggcagaagtggaccatgcagaataaacaatcaagcctagcttttttaaaaacctgaggtcttactaaagagaaaggaggaaaaacggaagatttcaacataagagtgttaaaggtggaaaagagccagaaaggactgtgggcttaaaaaaaaaaaatcagtgaagcagtagtggtgtatgttggcaaagagaagtgtagagttgagaggagggagagaatttatagtagaggaagtcggtgtgaagttttcctctcaagatgcccagcagagcaaagaaggaatgaaggcaaaggccactgggaatagagtagggctggggctaaaacagcacgggagagtgcaacagggcccaaagtaagacattttcttttcttttcttttttttttcattaattgacccagatttgcttgtttgggaccaaaggcaatgcagagtttagggatctttataatttataaagtaatcacctttggcccaacataacacagatcataaggatcatggcagaattcgtctctgagacaagtacaaaataccattttagagttgattttagaagagaagtcagactaataaattgctgtgttgtagaaatactatggtgaattaaacagctttaactttttctatcagccacaggataaatacagaaactgtataattacatacacatccacagaagatagtagcctcatatgctaaaattgtgagttgtttgtctgtatactgtagtccaaagctcccattccaagaaatgttttatttggttcaaaatataaagggcaggttagagggctacacagaaaaaaggctaaaaataaagacagtaaaatgagggagaggaaaagtggaagtgcagcactactgatccagaaaaactgaggcatcagccacaaagaattcaatcaagtcagtgaggggcaaatggcacaaaagccaaacaagaaaaaggctgaataccatattaccaatctgagagcctcacttttggttttaagtcaaatattgaattagattgtgcaacttttctatttttatttttttatttttaaaaatccaccaaaattacttaaatcatttgacagagtcatacaattttaaatgactataaaaatgtgcagatcagtgccaaattttttggcaaaggctgaatggcagacagtaatccaagacgcagacaaccttgcttttaagccatccgttacacagagaccagcaggctcccttctacctgtgagaccaaataatcccaaaatgtaaccaaataatcataactccccctactcctaaaacctacccttcacccttcactgtctacgtcagcctctggacagacctgatgcctggggtttggccatttccgccttcccaccctgtgttggtctccctcctccctcctcaggtccctcagttctcccaggcctaacttggcgtgcttccttcctctctcaccccaatcaatccggctctccttccctttctgggttacgccacctgcccgactcccggtttccccctcgggggcccctccttgccctggggtctgctctcggcccgccaagttctcccaggggatccctccccacctgcctccatacagtcagactgtgttcagtgtccgtttcgcgcccgtagcgacaccacgacagaagcccactaagtgaccctctgctcccagaaaccctcctggctcctccagaccctccggggctctggcccgcagctcccctctccctccggcggcgggggtcggctgtgactcaccggagggccagcggccggggttggggtgggggggccggaatgctctcacttcctctccgcgcacctgccccgaggctggagcgccgcccggccgggcctccggcggatgttttccttgtccccaagcgtgtagtgcgcgccagccgccccctccgggacctgcgcgccagccaccgcgcccccaggacccagcgggcctggtcctcaccactcaccccctccccagcaggcacgcatgcgggctcgacccacacctctgcaccgccccccaacttctgggagaggactcctggctcagcccagcctctagctttccagaagcccctatatgcctacctcatcttcgttataggcgatgaaccttcacttctgtccccgtttccgcacacgcaccaatccccactggcgatcccttccccttcggcatcacccccaccttcatgcgccccagctccccactcacatccgccccctattgggctggctctagcttgcaagagcagaaggtggcccagggcccagccttccaggatgtcccctggaccccctctctgggaaaggcggcagagctactggccactgacaagacctttgggccctcgtgctagacaggccttcgaatccacctgctccagcccagagagcaggcccaggccgtgcctcccacaccgcagccgacctcagagcaccctgcctcaactgtgagttttttcttggcaatcctctgaaacggaaagggtatcagtcctgactagggcgaacgtgaggtccattctgcatctccatccaccttagctgtctccttggaaaaggacagcaagggagtttgaggtgcactgacacagtcatttctgaacagtgaagagatgacaggtagggtggtcccccttgaaaagtcagccagaagtagctgtatctgatgcactaggtggcagggagtgagtcttggagtaaatgggactgaaaacgtagaaaaaccaaataaatgccaaagagactatccctatggagaatacctagaacatgggtctttgaagtgtggaaaaatgaaagaaatccaatttgaccagggcctttagtgccaaagagatggctagcaggagagtggtgagaaaggagaactggagagttcacatgagcggaaataggaagaaatggatccaaatccaagtgagaaaaagcaggagacttaaagttagcctggcaggatgatgagaaaaggacatcttgtcctagggtagaggcgagggtgcagatctgggggaagaaggcttattgggaacagtttctcaaactagacattcagaagtcaatacaagggccaaaaccaaaatgttcctggaggtacctgtttttgaaagaggtgggaaaggtgacatggattaggggtctccatcccccaggccacaggccagtaccagtctgtggcctgttaggaagcgggagcacaaagcaggaggtgggcggcaggcgagtgagcattaccgcctgagctcctcctcctggcagatcagcagaggcattagattctcacaggagtgcaaaccccactgtgaactccgcatgcaagggatctagattgcacactccttatgagaatctaatgcctgatgatctgagatgaaacagtttcatcccaaaatcatctccccgctgctatccccctccatccactggtggaaaaattgttttccacaaaaccggtccctggtaccaaaaaggttggggactgctgacaaggagtatgagtgtgaaaggtgcagaggtctatgccaggagacagccatccccaatagaagccctcagctatgcacaaactgcttaatgtcattcaaagaaaataatgtcgcccattttgcctcagagctttagccccaatcacagcaactgctatttcctgacgcttacgcaccagagatggtgataagagcactgcacgcattatctcagtaatcctcataacagcccaatgagttggcattactatccccaatttatagatgaggaaacaggctcagagaggtgaagtaatctgaccaggttacatagctaagtggagtcaggatctgaatccaagaagactgtctctacagcccatgctctcaataatccatcctgggctcctccagaacctgtgggaaactcagaggatgccaaatgataaattcctaaaaacctcactccattatatatgggaggaaagagaggacacctctgtgaacctggagtgattcatcccatcagggcacttagagatgctcctctttgaaaggggaaagaaccatccccagatgtggggtgatcccacatctgctgtatgtttgaaggtgataagcaatggacagttcacctctggaatgcctgaggaaaagagaccctccccaccatctctgaggggcagccctatttcttggatacattagggaaaccctgccctaggatctgagggaaacacagtctccactccaggtgcctgctcactctcctggagcttctggccgtcgcaccctattgcagctcctgggtttggctggggcacaggattaaccatccccaggaaatgcctccctccggtccaggcagggatcccagcatacacacccctggtggtggcagtgggggagaaagggggaaggtggaatgcttccttctctccaggtcagggaagagatctggggaccacctgggggcccttgcccctcctgcctccttgctggggaagtgcccagtccagtgccccctccatggccacctccctccctctagctgtgccggggcatgaatcagctctcacagcttgttaaagctagacctcttgttttcatgccctcacctcaggaaacagagttacaacttttccagctctactcagcagggggccagggtcctcactttataaacatccccagcctgtgagagcagagggcagggagatagtgtgagacaggagcccaggggagaaagacagaaactaagactcaaggagcaacgcaaagcaaagtcaaggagtcaagaccagagtagctgagcagaggccaagaagggtctgagagggctgtgcagcagcaatggccctaaggatgctctgggctggacaggccaaggggatcctaggaggctgggggatcatctgcttggtgatgtctctactcctccagcacccaggagtctacagcaagtgctacttccaagctcaaggtaaagtggggtgaagcgttaggaatggaggagcagcagagagggcacagggaggatggggccttacagatgatcccgtgtcaaaatacccaggcttcytccagctgtgaaacaggaaagacaaactaaatacggggatagtgcgtacttactgtctccaccccagaccagaagagcctctgcctctcatcagcactcctacacctactaacatttcccgttcttccctagccccctgtcactatgaggggaaatattttaccctgggtgagtcttggctccgcaaggactgtttccattgcacctgtctgcatcctgttggcgtgggctgctgtgacacgtgagtgaccaaagatggccagagagaatgactctgatatgagtgactgagggatgaccagggagtgactagattgctgtgatgtaagaatgaacagaagagcaatacaagatgggccaaacctgaagggaccaacactagtgtgaaagataaggcttcaggctataaatcaggggaggttggggtggacctggagagaaaatactcctgttataaaacaaaaaggcccacatatggtaggtgacagcttagttaggaggaccaaggggccactgaaaggggctctgtggggggaaaactgtgagagagggaacatgtgggcagggataaaggcagcctttcactgtgctgactccttcccctatccttggttccccaggtcccagcatcccatcgacttcccggctgggtgtgaggtacgtcaggaggcaggaacctgccagttctccttggtgcaaaaatctgaccctcggctgccctgcaaagkgggagggcctgacccagaatggggctcagccaacacccctgttcctggggctcctgctccccactccagctaaactcaactgatcatccatctgctgactgctcactgctgctgccacttccagggaaaccactagcagctgccaatgtattctgaacaaataaattaatgctatagctgaaagcccgactctcactgtccacgacattggaccccaggtggaaaaagtgggtcccattagagtccaggtgctgagttctcagtatccggaaggaactagcaccagggtgggccagtttcagatggttatggtgctggtgctggggcctggggcagcatatgaggccagggtggggctagtaggcagcaccttgatgggcaggtcccagctgaaggtgtctacaggtacttgctcaggtcctgtccaggtggtaggttcgggctgttccacagggggtaggagtaccaatcctggttctcgggacgttacaaattcaaaatgcaatctccacttcaaggacactatggaagaaaaagattaaggtagaagcatcagaagctagcaggagtaaaagccaatgacaggatatagttagtgaatgagaagaaaacaatctgtgttcaggaagacagggaaaagtcacagggcagggagctgtgattaagggtttttctgaagcaatgggtactaccacagatgtgagctgaagatagcagtattaagtacctaataacccaagagtgaggcagtcaagtctaggtagcatgaagtaatcaaaaatcagtgtatcacagggtcctagtaggtaggtgtggggaaggagttctatcaagctgttaggagtttaggggtcagtgcatctaagaaacaggaagaggttgaaggtctgagaaactgttccgggtcagaggctagatgtgggtatgtctgggagtgtgtataaggaatcaggatccattacaccctcccttagcacagcattttactgtccccctctcccttctccagtaacagtgagggtctcaccaatggctgtacagaagcctggggtggagctgagagggattgggagggagaagctggttctagttgtatgtaggcaggattcctggtgccgggcgtgagtcacatgtgacacagaggggacaccccctgccccacgtcgccgctggtactcaggctgtacacgctcctcggtctgtaagctgactgaaaactgggagcaagagacaggtgtgtgctaacaggaagtgctgtctgtaggtgagaggacagcccaacctcaagctgttttacaaagggaccctggatgaccccactatccccttctacatgccacccctctttatacaggccttccaccctagcccttcaaccccagcaccccagcaggtaagaagctctgctcccttcttacctgcaaacaagctacggttccttcccctaagtttaaggtccccaccacgtcctcgccaagtctgtacacagatttgaagatgccaaacgtcccaactttccctcggccatcactgatattgtatagatctggggagaataggacactataagcctggagtctacatactggataacgtctaggactgggcaccacaggccaaaagatggggcttttctttaaaattggaggtgtcaggtatcagtggatccacagaagtgtgtggtggttaggagactgtctctgagatgggaaaacaatgaggggaaggatggggtaggacaattctgaaagaattctcacggaggctgcggcaggatgtggcagccattaggcgttccccagccagctcagctagccatgaatctttcttcccaccttcatcctcctccaagaatggactggatggggctacagcctcatcctggggaaaccggacatcctgaaggcctagagaaagaatgagtggagaggtaatgctgagagggaacagagatgagagtagaggttagggttttagattctaacatgagatggctaaaggtaaggggtgccagggctgaggtttacatctctatctccagaaccctccctcccttcccaactccctagcactgtcactgagaccaggaagtttccctgcagtccctcttgcaagccctctaagacaatttctgctttggcatcgcccttccccagcccttccctccaggagcccttgcttaccagtcagcacaagaaccctcagagggactctgagtaaagtgataggggagttgacacgctggcagccaatggtcagtttgtagacgtacttgactgactgaccccgaaaggagggtggtccctctatgggcagcacttcactgtaggagtctggttgggaagtagttgtcaggacagccagaggcaccagaggagtcctccctccaggagacttagaaggcaattcagggatggggacaatcactcacatgatttggactctccaggatcaagcctcaggtcacagaatagaattttcggtggagtagaaaggatacactggcccctctcacctgaaaaaggtaaaaatgactaatttaatgacccattgtccagtactgaacaagactagcacggcaagtggagatagtgaaaggctgccaggccctccgtccctgctgtgaaatgggaatagtcttctacccctaaagcaatagtcatgctccccaacatccccagcatgacagggactataagaacaagaacaattaacaacttcacccatgggtgacaatgcctccacacacaccctccgcaccccccctctcccaggcaaatgcccctctctaacctcggtgtggcagaaagacagtctggctgtcgggctggacatctggctgactagagtcaggaggaggcagtgctactcgactctcactggcatggaactggcagtggatttgggcactggcccaggccagggcctcactgtgggaaaaggaaaaggaggcatcagaggtagttcctgacctcacaaatgctttcccaagctccctatcacaccatcttaaccaacaaggttagatggctgtcctagtgatcaggaaatccacaatcccaaagagaaaccattaaataaagagtagcagactgtgcgtaaaaaggggaacgggggaggggaaggaaagcgtacagctatgtcatccacatcttctgttaaagagccctctcctacaatgacagcacagtgagcaagaggaggtggtgtcgctacaggacaacctgagctctgcctcagccccagagataatctggcttcttcccagaagggccaccaccttcagtgccagcatccccacctggatgcagaagtggccgtgggcggaagggggttggtgacggtcactacacactccagcgcctccccagccaaaaatacaggaccccggctgagctctgctaccacttcaatcatggcagctccggaatcagatctagaaggaaacaaggcggggcggaggtcagcaccttgacagggaggggcgttgcggtgagcacctagggctgagggctgaggacaggggtggtcagcaccgtggtgcccgagggagctcctggatataggaggggtaggcgggtgggagggaggcgactgaagactcagtactgcccagggggaggacatcgctctgggccctagaccccagcccctgtgcgacgggttcttctccctgggcacccccgcggagttcccaaactggcctccgctccccctttcctcaaagttccacgtcccagcccaagatcaccgccgctagtcacctcgcatagtcgacactagggatcggcacccctaggcctcatctgcccgcccctcagggacctggctaggtacgcggcggcggcggcggcggcggcgtccgctgggcggtagaggcgggacttcccttcggtcccccaccctccgcggagtcccttccggccggaagcgcccggcaggccagaccggaaagggctcgggtcatcccggcgcccagggtcaccttcccacgggctggcacctgggcgcgggcgctgccccggagccggccggcgggacctggcgcccaatcctgggggacccggtgccgtggcccaggggccgggccgaggtcccgggggcggtgccttgcgggcccgtcccggggcggtgcctggtgggctggccccgcggctcctcccctctctgcgggcccagtcgccctttggccgggcgagctaatcgtcggctcaatgacgacgaggcccgacccttcccgtccaggacctacagagacaaccgaaggagagcccaaggcggcttctttgctgtcgccgcccccactgaagcaagagctccccggctccactgaaacaccagctcatttaagctttccccaacgcccggccctccgggacgatacctaacaacgaccggcgcccgcatctggaataggctggcgagatacttagtatccgagggctcgggacttggcgccatcgaggtcatggggacccaggatccagggaacatgggaaccggcgtcccagcctcggagcagataagctgtgccaaagaggatccacaagtttattgccctgaagagactggcggcaccaaggatgtgcaggttacagactgtaagagtcccgaagacagccgacccccaaaagagacggactgctgcaatccggaggactctgggcagctgatggtttcctatgagggtaaagctatgggctaccaggtgcctccctttggctggcgcatctgtctggctcatgagtttacagagaagaggaaaccctttcaagctaacaacgtctccctaagcaacatgataaagcatataggcatgggcttgaggtgagtagaccccattgcctagaatgcctttggcttcactttgttccagctcaaaacttctagcagaggtgggaaagggcaagaaagcagttgggcttcttgtctgagtgaagcggtccctatccctggcatattttaggcctgtggttttggaccgtgagaccaggtcacatctctttgcaacacccttccctcccagtgttttgtcttttcagaaggaaagggtaggaacatttggtcatgcaatcagcctttcccattcaggctcttctcacatactggtttccaatgacttccctttgggattagctatactttgtggcaaggtaggaaaggataatctggctgctgtgatactaacacaatgttgttttatttgggggtgggggggtctcaaccccttatttcccacaagcagctggggcattctctgtacctcattagacacactgttagagtcccaacactactgcttctttcttcaagctttagctccagggagtaggtaagaagagcctccctgccctcacctctgaagtgatgagaaggtgctgtcattctgttctgggatagagagctcttgatattaagtcatttatcagagaggcactgccatagatgtagaacccatctagatccccactgagttcaaagactagtgatgaggagccagacccattaacaggaacaggtggatgtgaggacagaaagcatcaccctgaggtcatcctgactcagtctacacaatacacacagaactgtggagggaggcataaagcttgggaaaccctgcccttacagtttctagagtaggagacccttcatttccccagtcagtgctgtggggctgtgatggggagatcagttatctaaccctagccctggggagtgggaagggcctgatgctgcctgcacatctggctttgttggtgcctgtgggtagcctgtagcagagaagaatcatccctccaggctgcttctggaatcaattcagtccaagtttgaccccaaaagtttttgcatcaaaataggatctagtgtacatagagaagtacactgagttgcatgtggtaggaacaatgagatcaagaaaagatgggcatcctagcctcttagcccttaaatatgaactgagtcatagaggcctgaagctgtgctcaaccccctggaccctggctccccattccaggatagagtggggggtactgatacaaggcttttggaataggatgagttcctatgaggagaaagcacaggtgagacaagaattctaagtgataactcttgagttgaggttgaaattgtggagaaggccaaataggtcaggaatggccagctaccatattaagggagtaag

SEQ ID NO: 6935 - DNA, 27590 bp, Homo sapiens
aaagaattccacccctctaagcaggagtggtcttcccagcaatagctggcaatgcttccaaagacaggcaatagtctctctctgcccataagtatctgtatcctgcgctttcaggttggtttcgagggcttgtttgttctttttctttttttttttttttactaaattatcactttggcatgaagactggtagaaaagctcacagatagctacttcctaacttgggtacttaaaagcatatataatgaaagatacaaacaggtttttgctctccctaaagcagctccaggacgtggcagactacatcctctctagaaaacattctcattcatgcatgtcattgtcagccccttccctacctcctggggatcagggattctattacactcagtgaaggcccggtcctggcaaagctaagatagtttactggggagcaacatctctgaaggcttacgtttcagatggaaagcagcagttagataatccagcaatgcaaacacaaacgaatattcagaaccacatttaaatgaagtggtgcagttccttttggctgaaggtacttagtaataaaggggaaatcttgtttcactgcagggattattttgatgtttttgcttttgttgttttctggggggtgagggggggtgttgtttgcttgtttttgctatggtaaagttgggttgtgactattttgaaaatgtccatacatcatcccatatgtaggtaggactttttttcctacttatttttctttaggtcaatttaatatatcttgaaatcaaccttgggcggcatattttaagcctttgaatgggatttagttacaaaaagtgcccatcagtcaaaaagcattatcaaagccaacctgtctatttcagggtctaaaaaaacaaggcagagctgtttgttcacaatccatcattattggtacctgctagcaggaactcaagataaacaggtacagaatgtagctacagcttctgctctaaattatcttggttagatgccccggctatccgtgggaactggacctgccatgcttggcgccaagtaacagagaccctcctttcagtagtagcaccaggcggaccacagagggatcacatggagctgcgtggctgggtcttccctagtgctccatggatgctgcaggaaacccgaggccagtggaccaggggaaggaagacagggcagggcaggaagacagggaaagcttcctgagatttacaaacagccactcatggatcccaggactcctagggatgtgggagaacatgattacacaagctgtccattgggtgtggaacgtggctggggatgtattctaaagaaggctgatagcgaggcaggaagggaggcaggagtcctggaagaggcaaagaacaaaacgagaaccaaagggaggccctgggtgaaacagatgcagggctcagggtgcccgagggagactgtacacgatgattaaatgagggcaaccatcctgcacgtgaggcggaaaggagcgggtgaccaggctggatacttagattctcactaccatattccatcacatagaaactacacgcatatgtttaaaatgacaatatcataaatatgattctgggttaggacaagaggaggagtggctgagaaggaatcacggtagctgagtcttcatattactattgctgtgtagaccacacttctgaagcctaagaaacactgggggcctctgtttccctaaggtaatcatctgccttaaggacctgttggcctggcaatcctaccccggggtgtgtttcctggaggcgctctcccgcaggtgtgcctggagatcgctaaatgcaggatctaacacgctgtcctaatagcaaacactggcatcacccaggtacccatccatgaagaggggttacgcttgctgccatctattcctacaacaggagtattattcagctaagaaaacgaatggaccacagctgcacccatcaacctggagagactgcaaaaccacagtgctgaaagctaaaagcatgtcatggaaaaatatatattgtttgactctgcttctataaacggcaaaaggaagcaaggcttaagaacatattgtttaaggatacattaatatgtggtaaaactaaaaagagaagcgagggaaaatgaatcccaaatctgtgtagagaccacatcacaaagaagaagacgtgcacagctgggcggggggagctactcagggactggagcgggaagcattacagagaggcccactgaatgatttgtcatctctacatatgtatttcttctcttgtatgaatgatctgttttgatttaaaagtgaaaaaaaggtcgggtgcagtggctcacacctgtaaccccagcactttgggacgccgaggcgagtggatcacaaggtcaggtgattgagaccatcctggctaacatagtgaaaccttgtctctgctaaagaaaaaaaatacaaaaaaattagccaggcatggtggcgggtgcctgtagtcccagctacttgagaggctgaggcaggagaatggcgtgaaccccagaggcggagcttgcagtgagctgagatggcgccactgcactccagcctgggcgacagagcaagactccgtcttaaaaaaaagaatgaaatgatgctgatgaatattactgatcagctggaataaggcagaaacgtctacaggggaagctcacagccccttgtgcgctacacagccaaaggagcgtcatttcccaaagtgtgtttcctggaacgctggccacggcagcctaacaaaaaataaataaataaggagcctgtgagtaaggaaagttaggaaaacactgtaatgctgagccctaatccctcttctacaaatgcttggtgtacattaatgtattcacgtttctgaaagcactgctatagggaaacatttttcattctgttcatcttggtgttacccaatctcacgtgatcaatctctttaaagagaacttatcactattccaatcaaacattttgaaaaacacccccaaaaatgattccaaaccatgtaaattccaccctagctcagaagtacacaaaagtactttatgaagaataaatcagacctttcttgggaacattctaggcatagaacctttccaaagcattagaacatatcactgattgctttgaataaaaagaaaaactacccatcttgttctttctgtctctagcatcctacttcttacttacactgatgcccacacttaacttccaagtactgtcttaaaaatcaaagaaaacatttttctctctcttcccttcccaacaatattctgagctttttgaaatacatgtaaaagaaatatctatgcatataaaagctttcatgggtacacacaaacaagaagtaaggtgtctaaagacatacagcaagctgtcgacattactgagtaatctaaaggggatggatagaaaggggatgggggagaagaatgattaattagctttgacttcatacatccttattgtattatcttcactcattacaaaaagcaggtattactgttaaattttttaaatagggaggttgtttaaatgaaaacatttttccaaacgtgaattgaaaagcaagaaatcatcacagaagagacgctgaagcaaaaatgagattctccatccttttttttttttttttggcaaggggtggggagaacatgaaaaaatgttgacaaaataagtcaagtaattaacaaggtactttccaagcccttaacagagaagctgccatcatggtcaggtgtaattatggatttagaaaattcatccttcattgagaaaaaaaaaacaacactcctaaaggaaatgagagcttcggccttgctgggcatcgggaaatcactacaaggagaggcttaactcacgcaggctccctgaaagcacagagggagctaaagaaaaataattcgaggtgtctgcaagcgagaagcacagtcctccaccgttcgcacctgcccgctgaatcaaaggctttgaatactagaggctctttaccttctaatggaaacacattctcaacttctgtatggattagatctcacgacgcttgcatattccttcaagcatacatgagtataaaatcatgtgcaaaaaataaagtctcacttttcttgatatgcagccagtgttgtcacacgatggccaggtagaagtttccttctaaaaccacttttacttgagagcaaagaccaaaatgattcttgaaataatttaatgccttacccaagcagacacatcacggaaagccgccttgtaaacaactctgagaaatcagtgaactggggttaaataactctgcttccgtgaggatatcatcctcggagtcattgaaaggatgcacagagctggaatgacacacccacttgtgatgggtgattgaataattttgtaatatatgcttattcaccaaagcatcaagtccttcaagaaggaaaacacattgtattctcaaatgcaaatttaattttatttgcaggtttaaatcttttcaaagggcactactttgaaactctggaatattggcgcactctgcagagctttcggaacatgcagtgggctggctgacactcacaggaaatgatttgcaagagtccagcagcggggaaaggcaggtgtgtgcagggacctccttgtatctcagcgcacatcccatgaggattcagggctcccatcctgggggtggcctggacagcagggctggaccctctgtcatgacgtcttcacttttcaccaggtacatgcgttattttcagtatgtttagaaaaacaatgctgtctgaatttttcttatttggccaattatctgatccataatttctgctatgaagaaaaaatcaatgtcttcaaaattcaataaatgaaagctgtgaaatgtcagcagcaaacatgacaataataaaaagcacacagacagttatatttcctctgtgaaacagcaggtcctcatcagatgacgtctcaagaccccaaattcactaacaggggatggcgatgtctataaagacaccaaatcggagacacaaacggcagctttgctaagggcagtagatgaattaggagcatgcttatcaggggtattaggagcatggctgagaggagtgtctctccttttatgatgtctgacagcatcagcccagaacccgagtctaggagtctgctgagtacactgagacaatgtcttgcctgatagatgagacatgaaaatcccatctgtctggcaagttgcacttggctttccttagctgcccttcctgcagttagagtgcaggactcagcagcccagctaaggctttaagaaggatcacagacacaattgtacagtttcacttccacaagatgagtaagttctagacatctgctgcacaacatcgtacccagagttaacagtaccgtaacgtacatttaaaactctgtgaaaagggtggatataaagtgttctaaataaaacaaagacaataaaataataaagtacaacaaaatgctaaacaaaatataataaaatatcatgggtcctataccaagagctgctggctgtaatacgtttaagtcattacgccacgtgtcacattcagaaatcagtcacaagaatattctgagtttttatttttctctttggagaaattcagtgacacctagaacaatgcagcggagggagaggatctgcattaggctttaaacttcatgaggctgaggaaccctcagaaaaggaaaacaaaaagaggcagggggagagagcagaggccatgctgcactcaccagaggggcagagtcaccagctatgtgcctggcacccatgcagtccatggctggagccacccagggaacaggcagtggctcagaggcaggactcagggacagatagaagaaccaaggttcaacgagacagagcaagagggaaaaagaaacccctctgcttcggctcctggtagacgtgcatttcctggtttcccgggctcagcctgagagttattccaccgtaatcacaggaagccctcctctgactgcattatcatccaaatgcacacggttctacatcctgcagaagaaattctcaggcatyggtccctttacagcccctctaatgccrcctgccaccttcgtggctctccacagcttccrtgggagtcatttgccgagacaascrggggccattcttcctgggatgagcactggggccaccttatgtggcaccgccgaagtccagagcgcatgctgatggcagcactgtgaggtctttacagyggtttccataggtaatgggccaataaccaccaaatgtaagacttcataaaaaatctcattctcactgtgagggaaccaggaaatggagaaaaatcttttcttatttcttgattggggttttggggaagtctggcatcgcatcataatgtatccaggtgactagaaagagagaaagatgatttgtaccagcagcctagcagtcaagtttggaattccttaacctaagtctccaagtccacgggacttaccaactcctgcagccttactaaggtgaataaaattaaaatgaggtttattaagtaggctctcaacggaatgtctctgctgagagattctgcgtatttaggtgtgtgtgctaacaggaagaggtgagcacatgcatttataaccacctttgcaatccctgggacactccaaagttctttycataaattctatgtgtaacctttaattgcccatttgtgggacatgttgatttttactccacatctgctggagcacctactgatgtgaatcattttcctgcattttcactacttgtccrtttttcaaatccatcatttacaaatgaaaggcacctccactcaaggwaagaaaaatggatttgatgatgccctttaagcacccagctctagtggtataatgtgaaatacaccccagggctgtactgttgcctctgacagtaaggatgagatgggccctcacccttgcgtctatgatgtcctgaaagtcaccaggtgcccaaaggacacacaggcaccacccagtccttagctctgctctccaggcggctacttytggcccttgctcctattttcaatctccagtctcggatgaggttttcccacacagggtgacctcagattttgctttattttatgaaaatccaacttaggccctaaaataggcacatgcacttgcattttcattcttaaactccaaaagcaagctcaatcttctcctaacttctgggagttaaacattcagactcatccactggaatctcagtgtaaagaacatgaaaccttctcaaagctgccacttgttgtggatggaaataaagttaaaaaccaaggaactgattctggatcatcaaataaatttcagtgtttccagttatgcagtgagaagataaattcaaagatgtttccttcggttaaacacacatgaaaaaaatgcagtgtaggttaagcttttcatcgctaggtaaacaaaaagccatcacctaagagaggctgtattaacgaccacttggtaagtggtagcaatatacacagtgaactaaatttaattaataaggaagctccacagtcttaatgacaggcaacacaaaaatactgcaataggaaattaaattagaactttatcctaggtctttagagaatatctcaacgttattatcttagagaacatctcaacgttagatatcatctaacagatgatatcgtgttgacaaatttgaaagtggggtgctaatccacaatgaagctcagtgatctcaatgttcactatgtcacattttgtcatgtttttaaaaaaatgaaacggggtcttgaaatcttggcttcctgataatattcaaatctgaggcattaaatataatattcaaaaggataaccaactgattattgatttttattttagtgaaaaaactcatgttaagctaatatataatcatttttcatatggttacagagaacaattatagaaacttaactattcatctcaattgtttggaaaccatcaatacaggaaactaaattacatcagtcatcataatagctccagtattaaaaccctacagcaaagatactccattgggttgcatgaaatactaaatcaatcagctggagatgaaaatccaatgctgactgtccaggattgtcttgtcaagtcttctctcaggggaacgtggtgaataaaattattggactaaggagccaaacatatatgaccgtccatttaaagcaattactgcactttagttcccataactggagcattcccataactaagacagcaaaattcttccgtttcacaatgacaaagacattactattcccaattgtttgtatggaactgtttcttactcaaatactaacagatgaatggccccttcaccatatcccctgccagaagtaattcttgataggatatactgctctaattctgcccaaatcgcagaggaggccgggtgagcctacaatctagcgtatgtaagaagcaaaggggaaaaacactgaattctcctgtgatcaatcaaacgcatcaattcattcttaaaatttgggtctacatatggtatcaaaattctgtccaacaacttatgctataagccaggggtcataaaactatagcctgtggaccaaatctggcccacctcctggttttgtaaataaagttttgttggaactcagtagttgcccatttgtctacatattctctacagctgcttccctgcttcaccagcagagctgggttttcatgacctttgaaatgttacgatgttatggccttcaaagtccaaaatatttataatgtagctctttaggaaaaacttttaacacctgctatgagctattctttcaatcaacacgtagataataaagtcagttgcctattaagacaatcctaaaatgtgagaattgtccatgttctcaatatgtacaggaatgaatactctcccattttcctgggaaaagaggaagagtacgtccaagtcttccaaaagtgttattggtacattcaggtayaagttaaacaaggccaaaatatgcctatcttttgcttcactaaaatttgaactgtttatctggtatttctggagacaattcctaatcaccccccaacttccttgtaagctttctacataagattcctgacttagtcacatttagggaccgccctgtacttgctgcctcatttcacaatggtgctgataacagtgcccagtttcacggagattttaggaggattaaggtgagatcaggatttaattctcataaagctctagaactatgaccagcaagaactggttggcataaattgagttagctcaattaagactggagaatgagggaaggctgtatttttctttttcccccayaaaggttcagtttcttctggcaattgcggtcctattctctgtgaagtgcaggcaggttttgggagagattacacctccactgccaagaaaaaactcaaaagcattagaagtaaaatacttaataggccactaagtctgtttatattaggagtagcagggagctggatatggtaaaaacaggaataaactgatttaaattgaaaaagaccttcagacgtactgaaagacagcacattgttaagttccaatggagcaaagctttgaaaaatggagcagggaaggaatcctgcactattccgtaagaccagctcttgatttttcatgtcctatcaatatttcatagttcataatgttgtcaaaaaatgaaaattaagagatgtatgtataaagcagctaacacagtgtctggctctttgggaagtacacgaggttctttatttattgagctcggattctactgaataaatgccatccaggaggtggagggggactttggagaacatagagcacctaagttctgctctcacagcgcaaatcacatcaagactctcttacccaaggaacatgtgcagaaatccacaacaaacaattctgtacattgatagcgtattaagtaaatgcatattcttatacacatgtatatataagaatatacagtaggccgggcgcggtggctcacgcctttaatcccagcactttgggaggccraggtgggcagatcacttgaggtcacgagtttgagaccagcctggccaacatggcaaaaccctgtctctactaaaaatacaaaaattagctgggcatggtggcgggtgcctgtaattccagctactcgggaggctgaggcaccagaattgcttgagtttgggaggtggaggttgcagtgagctgagcttgcaccactgcactatagcctgggcaacagagtgagactctgtcacaaaaaaaaaaaaaaaaaaaaaaaaagagaagaagaatatatggtagatgacaatgtaatagatgatgttctaaaaagtcaccttttaaattattttggaaaactgaatccctctaagtgcatgataaacagtggttatctgaaggtagccttaatcaaaatgagcatttatttggtaaggtttacttgttgataagtcatacttgcatgtaaagagtttgcttaaagtgcattatacccatagatgataactcttttaaaataactgactctactctgtattcaaacagagagactattcatgcttgtcaagaagtaaagaacaggggaaggctatgggagaccattgtgtcttacatggtatatagacatttctgctttaacggagcttatttaaatttcatggcaaacatcaccctgtttcaacacttgtcatatgaatcgcaatttaagctgattgcacttcagcaatgtttaaaaatgtcctttaaatactaacaaaatatgtattgtcatcgaagaagcaaaagtccaacaaggaactttacacaggcctaacgtatggaagaggaacatttcttcgtaaagccacatggtgtttgctgtggccacctgcctccatccacttacgccatcaagagtgggtggttgccaaacacgtgtctgagttcagctttaatctgcttaccctattttctcagtagaggttctgtaaaatatcaaatcgaatgcatcatgcaactcgcccaccacaacagagatggaacgtggaaatcccagggctgagagacccagaggatgaaccaggcaggccagaagctgcactccttcatccacgctggagtcggaagcagagaaagctccagagtgaaaatgttcattaacacccacggaccaaaaaggaaagagccaataacgtatgaatctgaaggtgaagatgttggttctctaccattttcatggtgtgaatgaatcacaagtcttattttaagggactcagaagtatcatcagcagttccatgtgacaatatttactctgtggggaaggaaaaaatcagtacctttaaaataaatttcctcattgtcatatttgggttcagagaagaaaaaaaaaaccatcaataaatgttattttctattagaacttaggggcatccagctcagatagcccaaggcatggtaatgaaagggtaactttattgctcatggtcatcaaacagagccaggccacccacagtcaaatggggagggtgactgatctggaggcgggtcataggatagcaagtcatgtgcaaggatggcttgtccaacaggccaagagcagccattgagggtatcggctatcacggcctctcaaagccacatttacttcttacctactcaaccctaggtgatcttcttcaatgtttaacaaattctgaaacaaatgtctgggatgcacactggaaacacaaataaaatgaatttaggtttcctttcaactttgtactgagtaacagatctgtgggacaaagctacttcaccttttgagtgactcagtttccaaacgcccatctctatttttttttaaaaaaacggtcaggcacggtggctcacgccagtgatcccagcactttgggagactgaggcaggtggattgcttgaggtcaggagttcgagaccagcctggccaacatggtgaaaccctaagtccactaaaaatacaaagattagctgggtgtggtggtgcatgcctgtaatcccagctactcaggaggctgaggcaggagaattgcttgaacctggcaggcagaggttgcagtgagccaacatcacatcactgcactccagcctgggtgacagagtgagactccatctcaaaaccaaaccaaacaaaacaaaacagattttcaagtttctttctcgaatccacggaaacagccaataaatgaacacaaatgggaaaaagctctgtaggatttgcctccctcgcttaaatgaaatgaatattctggaatcttaagatcttccctttcccctctcaatctaggaaggcctaggagatcactcagaagcctccgtccaggcaagggggagaaggtgccagggagctgtgactgccgagatacagggatgtggatgaagccaggagcgtttgtacaacattctagccatattcactttaaactatggacactggagtttctaaaaagagaaaaaaacattaagcaacatttacaagccaaattccctgcctttctttgaatctcaaaaaaaaaaaaaatcaaaattgtgtaagaaatgtcttaaaataagtttttgattttttactttaactttagttagtggactaatatatgagaaccccgaagtgaggggtgcacacacatttagagtatggcacagctgcagaatgtgccaaaacacaaattaggtgaattggacacggggagatccgcagccctaccgtgcagtgcaattaaagcgaagactgtttaattctccaaagactcaataatatgaaaaaaaaaaaaacgtttacggaaaacatggaactgacagttccaggaactcagaggtcatcaaacataactagagatttttttatttttaattctgtacttttcccatttggaacttggtgttaaagaataaaatgcttgctttccaatgtttcatagcttgttatcacatcacccatgagccacgctgcgaaataaatacatctaaagtcaggtcgtcaattcttagaccaaactagcaaaataatttattgcactaagcgcataaaatgtcaagggtaggtaattagaattatatgcacagtgtgttagtcatctttaaaaaaaataaaaacacatatcctgtccactatgactgaatctcagcaaatgacagcaccaaagaggtgttcaagataatcaaaaggccatggtaatacgatgccattatacatggcaccagaagggtgtgaagtggcctcttgtggtatagatgggatacgtatattgtgatgaatcattttaatagctgttattcaacgaagaaaacgtgagaatatcactgaaattatattggggaagcttagagtgctatcgaaatgcaaaatgatttgagtatattgctgtttcagtgcctgtttttatttcaaagtgtaactaatacagtgagataatgagggacggctaatgacgacaaaagaatgctggtcaaagctactctccagccagcctggacgcagcatcagcttcctgagagcctggcatgagcagttggcatttttggtcagaatctgtcctctggttgcatcagacagaactggatttgaatccaggctccaccccttcctagctgtgtgaccttggagagatcatttacgttctctgatccacatctgtggagacagtttaacagtattgagtgcccagttatctggtaagaaccaaagtatataatccacaatggaccgagtacctgccaccctggaggcgcacaaccgaagcggagcatcattctcatcgaagtctcatattcagtcagggcttggggaaggaaaaaagtacaacaaggaggcttccatgttccttgccttcccctttaccccatccctcttccatgcctgtggaacctaaggtggggatggagggcaaacaaggaagttcctacaccccccagctgggagaagactgcaggcctccctgcagcagctccctaaagaaaagcctcctgtgcaccggggcagaaggcctgggaagggcagccagtagctccagcaccagcacacagcgctggtgggtggaaactcaagtgtgaaatccattcttaccccttcctgtcctagttctttttttttttttggagacagagtctcgctctgtcacccaggctggaatgccatggcgcgatcttggctcactgcaaccttcacctcccaggttcaagtgattctactgcctcagcttaccgactagctgggattacagtcatgagccactatgcctggctaattttcctatttttagtagagacaagctttcaccatagtggccaggctggtctcgaactcctgagctcaagcaatctgcccgccttggcctcccaaaatgctcggattacaggcataagccaccgtgcctggctccttcctgccctagttctgatcagaagtgtcactctctgtgggcatgtcagccactttatgagaaggtggcttcagcaggctcaatgagactggtggccttaccagcaaggattaagacaagcccattgagccatctacctgtgctgaagaggttggctccccagtgacgagaatgggatagtaagaaaccctatagaaaccagcacccaagactgaccaaataaaggtcaacaaaataaagggtttctgtttcattccccaggagtccgcctaaaagaaaggagaggctgcagttgggaggggaaagccttggggtttgctcagagccctgaaaatgagggattgtgaggggagaggggagagccagagtgcacgcctgctcttccttattcccatacatcactgcctcagttgcagggagcattagaaaaaaacaaaaacctagagctacttccctctctttcaaaaggaaaaccttccatttctgtggataaatcagattcacaatgatgcatcatagaaagccagggatctcaacgagtcctcacgatgctcaggttttccaaaacaaatttgtatttcaggccaataaaccatctctagtttcttaccatgaaaggaaaagaaagccagaggagtggcatggccctggaacatggaccagcacctcagaaacagctctggttcccaccagaaggaaacacggctcggctgccaggaccgtgcaagagccacgggcaaggggctttacacaaagcgagagtcttaaaccagaaataagcccagaaagaggagagtgaaggctcgagcagaatatgacaaggggaatgatgcagaaagccttcctgcagggcttctcggcagaaaaggaggccccactggggcaccttgaggattgtgtctgtcttgttcttgaaagacaaggctaaagtgtccccaagggaatgatctcgaccctacaggtcgaaggcgatatgagttacttttccctcgtaggcgttgagcactggctgatctgctaccacagcttctgaactgacgggtgtaacctgcccatcacagacttaggttgggctcatctatgagtctctttggaatatgcagatgtcagaggcatccgaaccacagcgactccattttgagtgaggactagagaaatgaggctgagacttactgggctgcattcttagaaagttaggcattcctcacctctagatgtttaaggttaagggaacacactggtgatgtttactaaacagacccagacttgggagtgtcctaatatccagacatcctgagaacaaaggcgttcctaattttactttaaagataataatatcgggcgcagtggctcacgcctgtaatcttagcactttgggaggctgagatgggtggattgcctgagctgaggagttggagaccagcctgggcaacatggtgaaacctcatttctactaaaatacaaaaaatcagccaggcgtggttacaggttactcaggaggctgaggcacgagaattgcttgaacatgggagatggaggttgcagtaaactgacatcacgccactctagcctgggcaacaaaacgaaactctgtctccaaaacaaaaacaaaaacaaaaacgaaaacagataatatcgattcttgcaaaatataataattaagaaatttaatcctttatcacaaaccctcgtagcagagcagagctccccatatatatgagtattgtacctaggctggacgcattcctcctcttacttttgggaatgtcccactctgtctatggagtagctgttctttcactactttattctcttaataaacttgttttcactttgcacagtggactcgccctgtgttctttcttgtgtgagatccgggaaccctctcttgggatctggatcgggaccgcttttgtgtaacaaagacatgggaaagaaaaattcacgtccatagcgagctctgtcacagcgacatcggacagttgggagggcaggcgtttcatcggcagtctcctaaagaaggaagttctgctgtgtagctaaactggaaggctcctcttctgcagttgctagtttggagacacttttctcttctcctgccttgcacactggagaggatacaggttaatcacactgacagatacactggttcactgaggggtaagggttattggggagcatgcatgtggacattgcaatgacacagtgatgatgctcagacaaatgaggtcacactgagacaggaagcatctccatgaatttctatataggtggaaaactgcataagcaactagtgcargagacagaatgatccagcaccagtgaagttgctgtggtcccgggcaacgagtatgcctcaaaggtaatccccattctgatattttccaccattgataactttgtcgcattcttggacttcatctaaagggaatcatgtcataaacactgggcgtctggcttcctttgttctgcacctttgtagaagccctccatgccaaagcatgcatcagcagttagtgcttttgggttgctgtctagtattccactatacgaagaaccaagaaatctttatctactgttgactggtatttggattatttcccgtttggaacagatatagataaacctgttatgaacattcttgaacatgtttgacttgtatattcttgactttttaatgtggaaattgagacctcaaactcactataccataggggtggaattccagcaattctctgtacaacccctgcacaattccaagaagaaggcaaaagaagagagacgtggatattttgcttagttagccgtcttgaactttcccttatttttattcctctgcttttaggaaatcccacttgaaaagtagctattttctcctttgcaagtctatctttttcaacaaaaatcttaagcaaaatataaaaagccaataccaattgattcctaaaatgaatctatcaagtttcactttttttttttcctgaggaagccgagcatattgactcattctagaccctaaaaatatgcctacatcccatctattaaaaaaaaatgcaagagggatctgtgggcaggaagatggctgaaactcccttctctccagccagcccccagcatgatgcttgctttaaagcctggagcatgatgacacacacctcacccatgtggaatatctctccagagccaaaggtaaggtgaggcaagttttcaccaatattttgatttgtgatgctgaagacatgcacttaagcactacaatatgtaaatggtttcctacttcaaaaaaaaaaaaaaaagaagcgatgccaatgattttaatagacttagcaaaacaactgtaagtctactacacaattgaacaactctaagcagtcctgatgatgctacagaattccgttatactctcctcttcatgtaagtggattttctaacctgccaattacggctttccattttcttcctggagttatacatcatgcgaatctcagatagcactgtccttggagctgttttcttgccagttcacagtgccacctgtggctgagcactgccttgctgggcatgcatttatgttgacctgttttcactcttggtcccggaaaacttcagccttctgatactaccagcccaatgcccaagtttcctggcagctttatttacagtcactttaaaagacggaaggcagatttcaattttatggattgccaataaagtaagatttacagaagytccccagaccactgggaaaattactggagcccacagctgcaacagcacatccccaagggaacatgctggagagtggcaacttctcctatctggttttaaacgtccccaactcctatacattcccttcccaggccccttccaggcagaagaggggactgcagtttccatactgctcacacaaaattaagcatctctttccagccagctcccaacagcctccctggtaagctggaaaatcagcttgggggatctgagttaagaagaacaacaagaagagtgaggtgggcagagtttggatccacaggctcaggactcccgtcctgggcatatctggatccccaaggctggcaaaattgtataccaaaggatgctgcggggtaaagagggaaatagatgacattttagatttttttttcttctgaaatgtctggacacactgcccaaagcatccacatacaaagaaggtatttcgtataaagtcatttataaaaaacagacactctataaggcagtgataggctcagttcagctcagcgaacaaggatggagctatggcttggtcacaggcacagagctggtgctaggtgcagagactcagggatgtataggcaaagaggtctcactgcccactgatgtgtctggagaggtgggtgggtgaagggactttccatttgtcctcccaatttcctctccgaagcctgtcccttccctggggtccactacttctctgacctttcctgagaaacagactaataaatgtggctacttacattttacattacattctaggagcaaatccagggggccaggagccctgcactcggctggctgcttagtccctggcccagaccccagggcctgacaggcatcagaggggcccctgggtctgctgctctgagctcaaaacacccaatactctttggtgggtgggaaattaagggcggggatagctccgtgtgcatcctaggtcttttcctctcccaagagaattctactctgccacaaaggaactcagcctctgcgccctgtggcttctgctgacgggtggtgtgtgctctggakggggggtagggttcctggctaggagtggcagtggcgcctgctctggagtgtccctaaatgtcagcatgcaacattaccaggcaggccctcccacttcagtcctcaggccactcataggacctcctgtccccatgtagagaggctgacaccaggttggagccagcactgaaaggatccccgaactcctgcttctacaaggcagcatccgcaggtgagcggccaggcacctacaagacacgcacccttcgagcctggcttcccaaagccccgccgggccaggctggctggcacagcagacagtcatgcagcagggtccccagcgaccccccatccctgagagaacacacggagtcccccgcccgccagctgctccggaggcggctccagggtagactcaacaagttcccgggccatgcagcgccgcctgcagcccagaaacccggaggacgcgctgtggcggagccccgcgcgcaggcggcagccggcggcagccggcggcagctccttccacctcctcctcctcttcctcctcctcctccagctctggcggcggcgggagggggctcctccactccctccctatcccccaccccacgcacgcggcccggcccggcccggccccgcgccgcccccgccccacctccgccccgcggggcccggggctccgcccgcctcggtgccagccgggcgcacaggcggcaggcgcgcggcttggggcgccctcgcctctggccgcccggctccgcggagtagctgggacctggagcagcggaaaggacttccctcctgctccctcctctgccccgcccccgcctcctggccctggctctgagatctcgccgaagacaattgcagtaaatgaggacatcggaggagcgcgaagccgggtggctgtggctggctccgccgcgtcgcgagcaagcgagcgcgcgggcgtccccggagctggcccagccgctgcctccccgcgcgcgtcgctaagcggggccggagggacgcgagcgacgcgagctgcggcgcgggggccggccgggccagcagggccgggccggcagcggtggagggggcgggcagcaggcgcgcagcgggccaagtccccggagccgaggcttcctccgcgtgagcscggcgagtctggccgcggatgccctgtccggagtgctccgtgccgccccaggcttgccagggtccgcagcgagacatgcccgagccaggcgctgcatcgacctcgacttatctgtaagcagcggaaggtaagcggagccccgcgtgccctcctcccgcgcccccgcgcccgtcgtacttggccgcgggcagagcaccgctgggacgggcgccgaccccgattcgggcgcacacactcggccccaaaccggcttggccggaaactcggcggctcccggggccgggacaccccggtgcagccgggagcggaccsggtgcggtcgcaggtggggggcaaggttatgcaactgcatctggcgcgaccgggtcgctgaggggcgtctggcaactttggcgacgtcagggaggagcggggctgcgcctctgcgatgtgggttccagacagacgccacagcttcgtgagcgcccgacagccctagccaggcaaaactgggagatctgggggcggccgtctccccggaaggtttcgaggcttttaagtattttccaaactaaagcgccctggaaagtacaagtacggctgattaacttcgggggggggatgagttggaacagaggggccctgacgccggccgttgaggagaggcgcgagcagcagtgaaggcagatgcccacgtgaaatgctcgtctcctccactcgctggggttggcaccttcccggggctgcgggttggggtcggcgccgcggggcttcccggtgcctggcagcccgagtcagaccgggacaggcgtgggaaaccaaccaacgctgcagacctaagagactgcgagctggcgggcgagggcaggagggaggagggagcccgcgggcagcccggggtcggggcagctcctggagcccaaagtcaagagcgagagtctgcatcttgctggttcatgctcagggctccaggctgatgtccccactgcttggataaagagccgctccctgtgacctcagcattctactacccaaaaatatgccacagggagagggagccagtgataaagagatgccaggagtgggggaggagaggtgcctctggagtaaataggagagaaaatgggtgcgttttgcttatctacagcccagggctcccgcccggacccctctcctgctgttggtctgtgctggggagctgcacgcgctctgggcccctgcgccagaagcagcgaagcggtttactttgaccttgtctgcttaggcgctgaaattctgcggaagcatcccgaggtgaaactgcaagagtgggaatgaactttgggggagccctgccttggctgggaagcgaaacgatcatttcagaagactacagctcaggatagcacagggtagacgtctgtgcacttgaacgctcccccctcaacgaggacttgctagagggttacctttccatgccttatctcagtggggggactgtcagggtgactgcgctggctgggtacttgatgaaaaaataccactcacaagacccgggccattcccagagtagtacatacatgaaaatgatataacccttattaagcttacgctacagcaagttaccgtcatttcactatgcagaggcggaaagtgctggtttttactattcccccacactgtactatttcttacattcatatcctgttgaatgttacttttgaaagttcatatttatctttgcaatttttttgcaagaatgattagcaaacatgcacaaggagctcaaagaaaaaatggaagtcctgccatctgcatgcctcaccagatattaatcatttactatccatgtttactacttacattagatggcactgctcctcacgatggttttattagaggcgcatttggttaaggaaaagaaaaagtctagcacagctatcactaattgcatgattttgcataaattacattagccatggagagttttgttttcttcactaaattcatcattttgtttaaaagactaaacaattcagtttaatttctttagctaaatgaaagacttttccttaaagacaagatgtccttgaaaagctacatatgtctttaaacttattacagttgccacgactttgtattttatcattgtgattaagactttgagctttcatgtaagtcaggccctttatcctattaagaaacagaattactggttaagaaataggctaacaaggcaaaagctgggaagctccatgtctgcacaatgagatttctgcaagctctatgggaggctgggtactctattactctgtttacttcgggggcttctctgttttgccacagttgttttcccctgtggcaggaaagggaatttttgtgttttgtttctccctctgtagggaaaaatttttaaataagtcaataaataagagaaagacttgtacgtgaaaggcattcatctacaaggaagactcctacacactgaaataagcagtccaaaaatcaaaatgattctcagaaataacaacggatcgcagtggagtggcaggacagacccgttcacgtagacatttgtattctcttgtttgcgcccagccatggctatctcatttagagacaactactgaactctggaatatgagaagcaggtgacttatgcttctcagagactcatgatacagaaatgatcacagctacctcccaaagcagcagctctgtggtcagatatttacgtaggagggcagtgacaggttcaccacggattttaacgcttgtgaaggatgctgttcaacgcatccatagcatccaagaagctcagttgggaaggcaggcaaattctacatacttgaggcaaaccaccgtcattctgggagtgtgaggtcataaaaactccccagataaaaccagtgtcatcgtcattttcaacagtctttcataaatgtgaagcaccacaacccctccccaccatgattccactggttggagacctacattccccaaccagaaattagctggcatgatttatgaagcagatccttttttgtctcacatatttgattttaatatttcataacattatggggtgacttcaatattttaaagcaaaatttaatatgattgatactacatgacgacactttcattaccatgaaattctcatacaaacattgagagaagtctttattccaatactggagctaacctatgatatatatgtagtgaaacttcatgacttttaatcagtttatttaaaatgtacattgttcttatacattaaggacagaatacagacttgcaggaaccaaactatagggaccctgacaggattgctgtaaacaagttgtttggacaatgtcttgtgttaagcactaagccatgaaaggataggtttgaacctttggaccatgtgtgataatgtgtctgtttcagatcctgaaggcactaactaaggtatctccaggcaaccaaggatcttacctctcacattgagaaaaaccataacttcagagacatttcctggctccaaattcaagtcctttcagagacccctctactgtaagtcacaggatattcagtgtgcatttgagtcgtacgtgctttagacattattcaaaccataatgaatgggttgagggactttgaggtgtataaagatgttatcagatgacaaatcactacctgaataaaaacaaaacattctaacctgacaaatgtgtctctttctgctgagtatgtattcccagctctaattgggactgagagaaaattaacttgaatgtagaacagcagatattagggacaagcaggaattatgattctaaattactctataaaccttttggctaacaacatatttcaaagggatttggaaataactctccccaaagtcattatttgtgaatatttattttatagagcactgaactgtttattcaaagtattgcacatccatagacatgttctctttaccacactatcctgctgttaggaagtttgagcaaaaaaagaaaagaagagagtcttacatctctgcacagcatacattcatatgaattatactattctatccaatagaatggtaaagaaacaaaagaaaaccccaccatatcaaaatgcttgttgaagtttatattctacttaatatggaaaattccagttcagcccttaataatctagctttggccatgaaatgaaatgcagtaaactacaacatatgagagacatgggaaggaggctacggaatgctgaaaatactacaggcagccttgcaaataaaagttgctctcactccatctcagcagagatgatcacagctatatcccaaagcaggggttccatggacaggcacatcccagagagaaagaggaaaaagcacaggctgatggcgtgagggcctttttacagctgttcagttgaggaagcagcatggggctatatcctattcactgccaaccttaatgaaattgagcagtctttgtgtttctaggtcattccactggtgatgtgagatcccccacccttgttcttctctaggaaggatcttgtatttgtcaatggtccttcttcatgtttttaaaaatcttttctatgtgtacttagtggttacattttagatacctcttactacctgcattttgtacagtgaaatctgcttatttttgtagtaagtgattttagcatccttaaaaaatgcagcaaagatataaaacctgggatttttaaatggggcaagcatagggaaggtagatggatacgcagatggctttgttcagagaggacttctgatttgtggatatgtactgagctgttgcagcagtggccaaggcaatgtgtaaggtgttacaagaccaagtgagaggactccaagaagctcaagtccaggaggaggggaggaggtggcaaggaagtggcaggagcctaaagactcccaggtagaatcaggataggagattacaggcagagagtgatgccccggctcacttcgtgggtgatgcttgagattgcactcctgagcccagcagacattagtcctggagcttaagccaagtggtagggtgctcagggctacagacttgtatgggaagagtgagaagtgacattcagcaaaggttgaggtgctggaatcagagagtggaggcatagtctggagtcagtttgaggaggaaccagcagggcaagagggtcctctgttgatgtttgaaacaagaacatatattctcagaagattaaggcggtataactagaggcaaaccagaggagaggagttggagaccagttgagaaggtgtcacagatgagaatgtgccagtctcagtagcactgggaagtaagttagggggcagctatgagtaaaaccttctggcagacaagtctttgtaatgtggcaagatagaaagaagggattaaagatgctacccaaggccagcaaggcggtgggggattttaatggcaacagaaatctgggagccagcaggaacgggggggggaagataggatttctattaaatatttgagtgtgaattttcaactggaaatattatttaaaaaataagtttttcattatctcttacctcctagaatgtccacaagaaatactttgaaataggaggaaattggatgaagcgattcacagcgcaaatccttaaatgactaagcatagtactatctataacaggtgcttaataaatatttaatgaggctactaacacaaacctagccagtgattttgctaccaactcagggaatcctgattgggaaagaattgttttcttccatttccacttgtaactttttgtgtagcaggaattaaaggaaacaccgtgagaaggcagtaaagaggaagacggcttccagggctgaacagtactgacgtctggccatgcagtgtttagaaaagaaaaaagcaccaaagggttgggttctttaccaccaaactcaacctcagcgattcctttggtgaaaattcagttgggtagaagttgagtttttagagaaagaatgtctttgaatttggtgacctagtattagggtaaaagaagcaaataaggagaattgagaaaatgtatctcactgcagtcagataaattaatgttcttataacccaaatgctgacattctgggttaaaaagagttttcaccagagctcaccaaaaaaactggagagttcatcgggccagcatgagagaaggagatgtctgtctctcagccttaacctcacatctcaatttgacgtcgtgacttcaactccattgatctctgtgccagacccaccaatttatcattttaaaaatcaatgacagcgctgcataaagattatttttgtctttttttccttgcgtaaatcacactgcacagtgtccacttaaccgtgcacttgagactcccatagcttagataatgtgccatgtgcaaacgtactgtgtgaacttaaaggaatgctgaaaatatgctgttcactttcaaaccgtatttttcatttgacttcttgcccaatgataactgcatttctcaattacttactgttttagttttaaaggtagttgttagctcagtggcttcactgaagtcattcatatcctcatttaatttgttttgcacttgctatttatattttagtcttgctatataatatttattctgaatatatatctactttatttattgtgtctatcacatttgtccatgtggcaaaaacacccagggtgaggctgaatgacagaagttagcaggtggctggacactggagcctcagacagagtgcccaggctcactggcagggttggccccacactgcactgggcaggtcaactactgagtgagtggcagagactggaccccaactcactcctagtaattatttaaaataattccacatggaagcatcagttctaactgtatctgaagagtcagtgagagtgaccactagcaaatgcagctttaaagtataagtctaagacaaccgtacagtttttaatcagccactcaaggttggaaccttctggtggtgattctcaagcttgtgtctcgtaggtcctgcatccagtgtcatccacatgcacaacacatcccaaggtgtgctgtctttgtgtacatccacttcatcaccagggctgtgtactgagcgcttcctaggagccgaccacctgagccctgacccagctcacagtggagtgcagcgtggtggtgcggtaacaggctccaggccaggctgtcctcctttgccctcctggctctgccagtatctgtgtgacctttggcatgtgactccactacctgtgcctctgt

SEQ ID NO: 6936 - DNA, 12852 bp, Homo sapiens
taagagaccagccattggattaagagcccacccttcttggccgggcgcggcggctcacgcctgtaatcccagcactttggagggccgaggcaggtggatcatctgaggtcaggagttcaataccagcctggccaacatggtgaaaccctgtatctaccaaaatacatgcaaaaaaattagccaggtgtggtggcgcatgcctgtaatcccagctactcgggaggctgaggcacgagaatcacttgaacctgggaggtggaggttgcagcgagctgagatcatgctattgtactccagcctgagtgacagagcaagacatggtctcaaacaaaaaataaagagcccatccttctccaacatgcacccacctcaacctgattatatctgcaaagaccctatttccaaataaggttacaatcacaggtgacaggaataaggacttcagcctatctttgaggggttcacaatctatcttacaatagacaccttggctgactctatcccatctccctggaccacctcgagatcatccgaattactttatgaataaaacaatccccaggacacctgggtgggttctctcctttctcacaaccatggccctcaggtatcctcctacgtcaaaatgcagaaaagctctgacaaaggtacccaaatgcttttcaaaaaagatgatctgctaactgcaggccctgggctttgtaatataaaccccgacaagtttgctaggtgtttcctgcgaaatcaactgctaacaatttttatgtgtcttcctaggatttaataaagcccagctctgagctcatcattgcttccagcttgctcaggagcagacagcaacctcagtcacgagacaatttatggcccagctgggaaagagagaaatgctgtggggaaattctttctggttgacaatggtcaaagcgattgcttctcactcaaggagaactgaaggatactccagtacatttaaaaatgaagggaaaactccctcctaactgaaccaggagcagtaatttaacaaaaagatttcatttcagttaatggatgatttactgaaaatgcaaataaattcagccctctgctacaattatcactagaatttcaaaataggggactcactttctaattaatcacagattcgagctaacccccaaaaaaggggctcatctgtgaaacacctgattggctgacctgtgatttttgacactaattagcatatagatattatttgtttggacattaaggatttaaggttacagaacatggcataacacagtatgcatgaacaaatactaaaattatggtgctcataacgaggaaccaatctgatcttaataatagttttaaaattcacactgattcacacttaatggattattttccctacagatggtttattacacgtggtgggaataattgcttttccaatattatgtttggtgggattaattaggtactgtttgtttcccctcaagataatataaacaaaaccttgaaatgagtaatattcagattagcaagcagagaagaaggcatcccaataggtaatgggtggtgaaatcgggcactctcgctccgacacgtctgaataatgcatagctttgggatgctccaagctgtcatcactttctgctaaaaatgcttcccgcatttcccctctcattgagctgattttcatcacaagggcttcccatgctcgtgccatgagggtttggtttatgttttcaatattctaaggtgctaaaacataactagaaagttaagaaatgtattactgtaaagttgggaagaaggtatagcatgattgagaggtgctttgtatttctgaggaatattaatctgttggttaattatgaaaacgtgatgaaaacacatcacagcaaacgcacccttccttggtgtcactggcatagctcctgcctggttctcctctcctccttctgtgctcactgcctatctctcctctcttttctccctccctccatcaagatggtccccatgacgatgcgtccccacttctctcatcacacatcctactctctacaattagggctcattctcatgactcactgaccccctatgatccagccagtataatccattcctgcagataccgcttgcttctgagctatggattcgtccctccacattcccacaggttagcttatcctactgccctggaggcatctcagactaagcatgtgcaaaaagtcaatgaccgtgttcctccattccaacacctccttccatctccattaatggtgtccacccacatttcttggcctgtgcttgtcttccacaactagcttgcgggcaaatcaacaggttctccctctcgaccatccctcactcccacccctcctctgcacaccgtggctgatgctgatgaactgggaatagctgccccacgctctgtgctggcctccctgattccacagccaagctcacatgaggccacagcaagttgttcagaacacttgacacaggctctatctcagtgaaaagctcaaatggtcccacctccagccactgatgggccacagctcacagctgccgtggctgagcggctctttaggacgcatttccaggctgctctccttcttcagctgtgccctgagattcaggctaagcctcccccacaactgtgaagagcaccccctaccgctttcccatgcatgccacaaaaagccacctctgccagcctctatcttccccttccctcatcccattgtcctggaatcagctgtgcaacccactagaccaggtatgtttagaagctcagccctgaggcagacagagaagcaaacacactctgcagcaactactttcatctgagttagagagcaggaatctggaagattctttgcctggtgtagacagagcctcgacggcatcttgcaaggttcctgaccgtcactccacacggcaggtttcttgttggcttgctatggcagccatgtaaaaagagaagagcaaaccccactgctggataatcttcttttatgcaaaacagaccacagccaggcttgcaaagaacaggcctgcaggtggaggcgctgaaaggggcttgaaggactttctgggagatgggcaggtgcagctccactacgtgaggatgggtctggcttctgacaccacattccccctcctcccctgccttcccttgtgagtaactgtgatgctttgttgcattgtaagaatctatgtgaaaaacaacgggctgacctgcttcgataacaaaatcgaatggcatgcggcacagtcaggtatagagaggtaatgctccatcttttaaaaacagtcagaagttctgagtaagaagaggcctcagaaattatacggcaagtacaacaactgctcatttcagaccagaggaaaggaaatcccagagaggttaagaaacgtgacccaaaccacacagcaacagcatgctgtaagaaagccagagcctgtctcccctaataggcccctgctatatttatttttacttaagagcatcattatcagtatccaatagaggagatttaaatatttatctccaacctgattttaggtttttcatgttgtcaacactctagttacacccatcaccttctcttaagaacaaaaggaacttaatgtatcatagctactttattggttatctaggggtgaggcaggaatcccaaacctcaattggcacagagctgtgggctgtgtttgtttaagcaaccttggccccaaaccctcccaatcacagttctttttttttttttatcggggtggggtgggcagtgtctcactggactgcagtggtataatcacagctcactgtaacctcaaattcctgggctcaaacaatcttctcgcctcagcccctcaagtagctaagagtacaggtgcacacaaccacacctaggtatttctaaattttttttgtagggagggggcgatatggtttggacgttttgtcccctccaaatctcatgttgaaatgtgacccccaatgctggagatggggcatagtgggaggtgtttgggtcatgggagtggataccttatgaataacttggtgccttccctgtggcaatgagtgaggtctggtttgatagttcacacgaaagctggttgttcaaaggaagctggcacctcctcctctccctctcttgctcctgctcgtgccatgtgtcatacctgctctccttctgccttctgccaggagtaaaagtttcctaaggcctctgagagctgagcagatgctggtaccacgcttgtacagcctgcagaactatgggccaaataaacctcttgtttatcaagttacccagcctcaggtattcctctagagcaacacaaaatggactcacagaaggggtttcactttgttgcccaggctgaaaacttaaattcctggcatcaagtgatcctcccacctaggcctcccaaagccctggggttacacctgaatccccataataattctatatgtgctatccttatttaagaataggacaacttggccaggtgtggtggctcacgcctgtaatcctgacactttgggagactgaggcgggcggatcaactgaggtcaggagttcgaaaccagcctggccaatgtggcgaaaactcgtctctactaaaaaatacaaaaattagctgggcatgcatctttagtcccagctacttgggaggctgaggcaggacaatcacttgaaccagggaggcggaggttgcagtgatccgagatcacgccgttgcactccagcctgggtgatagagccagactccatcttaaaaaaaaaaaaaaaataggacaactcacatgaaacactacatttgactgggtgtggtggctcacgcctgtagtctcagcactttgggaggccagggtgggtggatcacctgaggtcaggagttcaagaccagcctggtcatcatggtgaaaccccatctctactaaaagtacaaaaatcagcctggcgtggtgacgagtgcctgtaatcccagctagtggggaggctgaggcagaagaattgcttgaacctgggaggcggaggttgcagtgagccaagatggtaccattgcactccaggctgggcaacaagagtgagaattcatctaaaacaaaaaacaaaaaacaaaacaaaacaaaacaaaaaacgacaacaaaaagcaaaacaaaaccacatttagtgcaaataatggtctctgggagaaaaggaagttcaactggtaaataaaatctgttctattgcattataagtatatctgagacaggccttaaactggacaccccaagtaccatgaggatggaagagagagggtcagtaacacaaaatgagttgaggggccaggtgggctgagacaagtggtcacctgcacctgccctggagggtaacgtgggcgagcacacactggctttctcaagctgcatatccgcggtgtgctccgggtggcttcacctgaggagtgaaggagctcagtacgcctgcatgatggaggcagatcagatgactaggcgggttctcagggcatactggaggcagagagttgggtggggaagtggatggtggttttggcagaggccacatcctgtctgttctcatcaggctttttacaatgaagagtcttttcttttgtgttggtttctttttgatttcctcaagcatcccacaaatacacagtgggtgccaccaacacgttaggccctgtgctgtatctaagggtgatctagccgcagaatctgctgcctggcttcagaggggttgatcttctggttcatagggcaggcaagtcgccctcatcccatgtccccagacccagccctttcacagcaggtggaagaggatgagctgccaacctgcgggtgggatggggtcagggggaagcatgctttggtcaaggacctccatccacctcaatggcaaagccatcacagtgctcgctgggaagggaccaggaaaccagtctgggctctgtgtaccaagggagaatgcaagtgacacacaaaacccggtgctggccccacagtgtccaatgacagcagcactccttcatggcaccagccacaggtaaggagaggcagctacactcagcccacttgtgttctctccatggtcgggcagtttttcctttcccacttgtgctaaggtctcctttgagataacagattgcacatcagtkacagcatcccatgccctatgaaaaggccattcctgccacttctgtgcttcttcagatgacacaaggctacaggagcatgcacaggagctcaacgtccttgacgctttgtggccctgggctagcagcagcgctcttcccaggatcatgtatgagtcctccacggcaccctacaacagccccctcctctcccacactcatgctactagcagatagatcccctttctctttgccttgctgagtgtggggccagcagccttggcagaaagctgcctgggtccttgctttgtttctcagcacctttcacattacaaattgaacctgtcaagtggggacttcccacccctgtttttaatatccctaacaacttggaggcagcaaactggtgatcaggagacaggacatgaaatttgtctgccagtatcagctctcggcgggttgaatgtcacttcacatcatcggcaggttttcctcgggaagcacaaaacattaaagcccatcactgcasgtggagctgcrggaacgactttatttcttctyaaataatgtgatcaacagcatacctgacaagcaggcacgttgcaccttgaatcaatcagcaggaatgcaaaagcatacaaagatgtaagcaacagtgcatctgagaaacagggagtcacagagagtaatgatcacacctgcaatttgtcagttaccaactgtcttttcttcatcttcccagcatgactccacagccccaaggcccctgtttgctcctctcctaggcatgctaccctgaagctccggtgacaaacactggtggcccatctcccttgtaaacagccagaaaggcctccgtgtactgtttcacactcttccacttctcatgaagcaagagaaaagagctttgcagcagaggtggccagtggagagcgctcccaaccagtagcagggctgcctgagtcactaaggtcttagggcccagggcagaaccctgagcttccttccctggcattggcacagaacccacagtgtctggatgggcattttcagatagaagtgggccccccctcccccgaaaacattaaaacagaggatttaaaaagaaaaattaatgcagagacctggagtggtcatactggaagtgcaaatggtaaaaactgtccaacaacagagtggtctattagaaatattgtcagaggctaactgtgactcagctcaggcaggtccttgaaatatatccagaggcactttggacacacagactttccaaggatcggctgccctgtgcatccttgtcaagccacagatacctgctctggagtggtgcctggcacagaacctggcttgcgaccctgggtcaggaggcactctgtgaaggacggagggagcccagagagggcctatttcctcacacaggccttcctaccgcaaacccacccttgtttaaaagatgatttatgtctgcatttcactggatatgccctgtcaccagaaatgctgtctgtccctctattctctctacgtaggctataataaacagtacacagccagcgcaacaggagagcagaaaggccgagctctgtctccccacaaggaagcgaaatcagcaaaaccaaaggaaggaggcaaacgcctggggatgcaggctcagctgctgatgagagctcctgtctgaccgtgagcaactctccttccctctcaggttctcacacggaactgacccgacagggcgctactgtctatgacaattaccccaaagctggcgctcccaacacatggggctgtgctgtaagactctggcactggccaccagggacagaactagacataggacccaaagggacattcagagttctgccttaggacatctggaactcaaatgaaggggctagtgtacatctctgtctgggggtggggttgtgggggctgagactgagaatgccaagtggccatattctctgcctgctttgaggataaaggggacagggcatgcaggaaggaagctggcacctgctaccaggtaaaattcgataccacttgcctcacatgtgtgcaaatggtctgtccagtaaatccacgtgacacttaagcacggtgagcctctgtgctgccctttgtaagcaaaagtcttgactgaagtgagagggctggaagtgagaacaagggatgtcttcccaatctcaacctaagccagagtacacagactctagactgtgtcttcagctgaagcagtcgaggatgcaaagccccagctgtcctatgcatccctgaggccccagcaaccttaaagtcctgcctcccagacgtttacaaaactaaacatgcaattaccatgggatctagcaactgcactcctgggcatttaactcagagaaataaaaacttttgtgcacacacaaaaaactgcacacaaatgttcaaagcagctttattcaaaataacccaaaactagaaacaacccaaatggccttgtatggttgaaaataattatgctatatccatattatgggatactactcagtaataaaaggaacaaactattgctatatacaacaacctggatggacctcaagggaattatgctgagtggaaaagaagccagtctcaaaaggttacctactgtatgagcccatttatgtaacattcatacggtgaaaaagttacgcagataaagaaggcattagtggttgtcagaaacggggtagggcgaggaggagaaaagaggcttgacctataaaagagtgacacaagttcttggttgtgatatattacagttatgccagatattaccactagaggaaactgagagaaggcgctacaggatctctttgtattatttctcataactgtggacatctttaattgctggaaaataaagttttaaaaacacaatacaaaactgccttccactcaaaactaccacgaccttcattttgaatatcacagaaaaggagtttcatggtattaaacaaatatacacaacataaaaacacaggaaattatggaaaaaaataaacactatctggagtaagataacatcatcgtaccttcaattaagtctgtatatcttttacatatgatctacagcattcatttcaggaaaatccaggcataccagaaaccaggacgtgatcataaaacaagactgacttcttcccaaaaaactcaacagaaacacatccacggaaacagaaccaccaagagtctttaagggaccaaaagactgaataggaaattttagtttccaattagcaaaaataaccaaatgaaaactccataacagaaacagagaacaaaaatgcatgaatttaccagcagattataggacagaagaaagaaatacaaaagtaaaaaatatatcagaaatatatagctagaataaaatacagagagaaaatgaatgaaaaataaagtaaaaaaaaaaaaagcataagacatgtatgtgatgtgggcctaaggtctaacaaatctgtaattgagttccaaaagaagaagagaaagggaatgaggtagaagtaatgataacggagatactgtctgagaattttccaaaatattataaactctaagcagtatagaaacaaaccaaaaaacatacattgagatctataaaactgcactcagatgccatttctcatgtgataaattttcaaaggtacaaaagtctggcaacataataggttggaaaggttgtggagaaataagcaggctcgtttatttctggtgagatgttacaattcaataaccttatggcattcaattgagtattatttaccaaaattgtcatatgcatttgccttccaattacatcaacccactgcaaagaatctatcatgaagacacactggcaaaaccatgtaaagttgtgtgcatgaggctatagatgaagcaccatctataacagtaaaagatgaaaaaccatcacacgcccattattagaggacaggtgcaagaaaatatgaatatgcatgcaatggaatctgcacagtggtaaaaagtgatgagaaatatctctatatactacaacacgccagtctccagaatacaaagttagatttaaaaagcagtattgatgttcccatttaataagaaagggatgggaatacaagtatgtgtttgcacgcatctgtgtgtgcgtgtttgtgtggtgtgtatttactgatattaaaagttaagttacaatatataaacaacaaatgaataaaagtggtttcctgtagggaaaggtaggggcagaagtgaaaatactatgaaaacacttgcttagtatatctgagacacattattctaaataaaaaagtgcaatcactaaaaatcaaaaacaaaataaaattatcctaaatatcaaattgatgagtttagctacatgcaaggattcatctcaagtgcctgagaaacatgacttgattgtgtatgtctgcaggatatatcctaaggagaaaacaaacttttaaagtaacaattggtattgttattctgaaactattttatgtgtgtgtgtgtgtgtgtgtgtgtgtgtgtgtgaaatatatacatagtatagtatatactatgtattctatattatgctgtatattacaaattattatatattttatatatacatacaaagcaacaagacatcatgtttgtgtcattagggacccaaattttcagtgtaagagacaaattacacatataaaatcaaagaaggtaactaaaatctccataatcctaaattggaaatgcaaatatagtatgaattcatgttgattttttttcctatggaaaatgtatttccttactttacatcctggtgcagggaaaagagaattaaaaaaaagaaaatgtatttcctagctctgcccactaaaaggcttggaaagaatgagtaactcagttgcagtgagcaccctcgttgtccagattatgatttctaaataccacttcccactaaaagcaactatatattcttggcttattccaggtttgggatggaaaatgtaaaagatcaacctgagatattttgtcacatcaaaaagaaagccattatcaaagactacttaagcagggtggtaaggacccaggaatccacctgaaaagactcctagtggaacaagatggaagaatttgttcagcaaaaagaatcataactacaacggacttagacacatgaaaattcatgaaggtattaaagaaaaaaatttactggtcatccttggaggatgccagggaaccaattcactatttagcaaatagataattaaaatgaaagagacaagcatttatccttcctttcctttaataaacactctcagggtaccatctattttatgaaaaaagtttccatcttatgaaagaattctggctaatgaaagcagacagaataacataattagagtaaggatttttttaactccaaaggaataatgggtctagtcaatgatcatcattggctgccataacaattaggtgaaaaactactgtatattgaaggaatctggataaatgctggcagcacctgatgccactaatcaatcttcacgttataagagacagaaaaacatgatgtgcttgctggtgtgatgcaatgggaagaacaccacaccacttatcaggtattcttgctaaaaaacaacaacaaacatacaaacaaacaaaacctgaatctcactgagtctgtagatctatcagtttacaaaagtatagcagacagaggaacacgttaaataacaccatgtggattcaatctgcaaaatccagaatgtggaatttcctacagaacttgaacaaacattgcaatataaattataaggaaaaaaaatggggagcctggtgcagtggctcattcctgtaatcctagcattttgggaggctgaggtgggaggatcgcttgaagccaggagttcaagagcagcctggccaacatggtgagattgcagctatacaaaaaaactaaaaattagctgggcatggtggtgcacacctatagtcctagctattcaggaggattgcttgagcccaagagttcgaggctgcagtgagctatgatcacatcactgcactccagcttggacaacagagtgagatcatgtacttcaaaaaaaaaaaaggccaggcgcagtggctcatgcctgtaatcccagcactttgggaggctaaggcaggcagatcacgaggtcaggagatcaagaccatcctggctaacacagtgaaaaccagcctctactaaaaatacaaaaaattagctgggcttggtggcaggtgcttgtagtcccagccactcaggaggctgaggcaggagaacggcatgaacccaggaggctgaggcaggagaacggcatgaacccaggaggtggaacttgcagtgagccgagattgtgccactgcactccagcctgggcgacagagcaagactctctctcaaaaaaaaacaaaaagaaaaaaaaaaagaaaaaaagtaggggtgtcaacctaaagattatcggaaacttactagatataacaaccaaaggcaatatttttaccttgtttagatactaagttgggcaaactataggaactatgtataaaacaacattttctaaggagtaataatatagaggtgttaaaaaattcttatttttaagagatatttttgaatgacaactgaaatatttatgaacgacatgatataatgcctaagatttgcttcaacataatggtgagaaagacaaagctgggatgata

SEQ ID NO: 6937 - DNA, 24782 bp, Homo sapiens
caaaaccttgtctctactaaaaatacaaaaactagctgggcgtggtggtgcgcacctgtaatcccaactacttgggaggctgaggctggagaatcacttgaacccaggaggcggaggttgcagtgagccgagattgtgccactgcactcctgcctgggcaacagtgagagtccatctcaaaaaataaaaataaaaaaaataaaaaaagaacacagcctttggggcaaaacaagctcaattcatatatgacttttgtagcctgatagttaattttaaatgtatgtggaaagcagaataatgaccccctaaagacattaataagctaattcccaaaaccttgaggtaaggatgttattttacatgacaaaagacattttgcacatatggttaagggtctaaagacagagggattattttggataatccaggtgggcctaatctaatcacatgggtctttattaggggaaggcaggaatgtcactgtcagagagagatttgaaggtgctgtgctgctggctttaaagctgtagcaagggaccataagctaaggaatgcaggtggcctctggaagctgaaaaaggcaaggaaacggcttcttccctagagcctccaaaagaaatgcagccctatcagtggcaccctgactttagccattttgaacctctcatttctagacagtaaaataataatttgtgttgtttttaatccacttgtcttagttcatgtgcctgtaacaaaataccataaaatgggtaacttataaacaacagaaatttatttctcacagttcaggaggctggaagtccaagatcagagtgctggcagatttggtgcctggtgagggcccactttctggttcattgatggtaacttctagatgtgtcctcacatagtagaaggaacaaggcagctttggtgggccccttttgtaagggcactaatcccattcatcggtattctaccctcatgacttaatgacctcacaaaggtttcatctcctaatgccatcaccttgggagtcaggatttcaacatgtgaatttgggagtgggagatacaaatattgagatcatagcacccctagtttatggtaatttattattacacaataattatagcatattgattaaactgtctcagcctcaagatctatatgaataaaaggagtataatagcaccttccttgactggtttgttctgagaaatgaaaacttcatcagttaatatacctattaagttactagtaattcatacctgctttaggaaatattacgaacttcaacatctaaaatcttcctgtcgatgctttgatctggagaatatctacaacgtttttcttcagggctcagataatgtcatttccctcaagtgtggaacgttggccagaaactcttctgattggtcagtgcctgcgtttaaatattctgaatatcgacgtttcctcaagactaggagaaagggtgtgcttcatcctagtgcatcatgaaaataatctgagagaaatggatggatgaagcccattaggcagggcaactactgttaaacagcttagcagagaaagaagagaaaattaccctcctgaagaagcaaattcactgagcccaaagaggccatggtgaattgatcatgggcaaaaatcattccatttgcagggccagatacgtgaatgtgcaatctgtgtggtagcacagtttatcatgcttaaagggccccacaggcggcttaatgctttatcaatgtctcaaaattattaataattttttaacaagatgttttacatttgtattctgctctagatcctgcaaattatgttacagtctctgactctgtgtgcgtgacaagggtgaattattttttgcttcatttcatgtagcttttattttataattaaactttttattttgagctagttgtagattcacatgcagttctaagaaatactaaagaaagatcccacatcttctttactcagtttctcccaatggtaacatctaaaaaactacactataatatcacgactaagataatgccattgatacaatgaggaaacgaaactcttccatcacgacggagagccacaccaccctttctccatactgccccttcttctccactcacccatccataaccctcattctctatctataccattttgtcatttcaataatgttacgtaaattaaatcacacagaatgcgatcttcagtaattggcttttcttacttagcctaagtactttgagattcaaggaagttgttatatgtatcaatagcccattcctttttattgctgagtagtaatccactgtatgcctataacagaatttacttaatttttcacccattgtgagacatacagttgtttacaagttttgactattatgaataaagctgttatgcacattttatatacaggcttttgtgtaaatataagttgtcatttgtgcgagagaaatgtctacaaatgtagtaactagactgtatgatagtttaacattaaaagaaactgtcagagtcacagatggcagaatagaaggccctaaactctccttccccaccatcaattcaacagcaacacagaggcaaattcccatcattggaaatccagaaactgactgagccactcctgcaccctaggtgagtgtgaaactatccacatcaaaactgataggaaaaaacttgcacacactgtgatcataacccccaaccctaatacaatgccatatgatcgggaaggaactcccatctcttagtctatccctgaggagtgaagggtttggaccacctatctggtatcacaacttctctagatactaccagatagactggtttctaatttccctgttttggtgagctgacagggcccagcatctgctaaacctctggggctacacaaaccaaaacagcagttgcttttaaaataataattgttatagccctgttacttcaaatattttcagagcggtttttaataagcatgtgggcacttccccctgctccccactttggctcagtgcagtgataaagcctggcttccagcttctctctgaaaagcaaaggagacagaccaaataactagcaccccagcttttctggctgctacctgaggaactggattttatctcatgtatctgagagcactggaagggcctggcatactctagatgcctgaggaccattaagaacaaacattgtggtttcaactaccaggaaggtttaagtggcacccagaacctctgtctggactgattggtaaaggtgttgtcctatctgagacctgtctgtgaagactggaaaggaagctgttttatctggtgcacagacaccaatgcagacagtcaaggaaaataaagaaatggaaaatatgttctaaatgttacccacacaacaggtgggttcagtcacttggcaggtatcaacccaatgaccaccgacaaggtggatttagcaaggagattttgttcttacagaaagtaaagagaacactggacaaagctcccaaagtagtacctcgccaagctgggaggtgggtcaggttttataagcatagggtagtgaggaataatctgattggatcttgcaatgaggtgatgctgggaggcaagatctgactggatcctgccatgaagtgatgcctgagttctatccagttggatcctggatcctgccatcctgtgtccacctcttaattcggtccctgtacctcagtctgaacgattaggtttcccttgtggttgcacacttgtttcacctgtccatgctcaggttacatgacctgagtgagggtccatgacaactgaagaacaactcacagctttgttaccataaaagttgaaccatgcatgtttattgctgcactattcacaatagccaagacatggaatcaatgtagatgcctatcaacagtgttctggataaagaaaatgtggtacatatacaccatggaatactacacagtcataaaaaagaacaaagtcatgtcctttgcaacaaaagatgcagctggaagccatcatcctaagtaaattaatgcagacacagaaaaacaaataccacatactctcacgtataagtgggagctaaatgctggaaacatgtggacataaagataggaaaaataggcttcgaattaagagagcagggagagagggaagataaggcaagttctgaaaaactacctattggatattatgctcactacctgagtgatgggatcattggtattgtaagatcagcgtcatgcaatacacccatgttaacaaacctgcacacgtacttcctaaatctaaaataaaatttgaaatataaagaaaacaaaaaacaaacccaaacatcttgctggtaatacagaaaatatggctcatggtagtggaagcccccataaagcatgtgtgattcaaaaaaataagaatcaaagctgaaaaaggaaacatacagaccaaccatatctataggaagcactctgtaaatgaggtagtatggaaaaaaaagattatgttgaataaaaaaaaaaaagttgaaccagatttgttaggaaagcaggagcataggaaagccagagtgacactattttaaaatcaactccatctaaaaactagcaaggcacttccttgacagttatgacctacgattataagatgtttacagctaaggaagcgatttagtaatgctgcaaggacaaactcctacgacagcagaatgtccagatgtcccaatatcacataacaatacatgcttttaaggtagctaaagtcatactttgatgtacttatgcactaagatgacaaggataagtttctttatatcaacaaaatactaaattttgtcacactgacagcctacccacatgtagacatagcttaggttttacatagattaaacccctataaaagaagagtttaaaacaaagacagcacattcctcctcctgcttttggaggatgccctactctgtaactgagtagctttcaataaactgtctattctctctacactctgtgactctccttgaattccttcctgcaggagatccaagaaccctctttcatggtctggttcaagagcccctttctgacaacagatcagtctggagcagttacaaatcccctcctttttatgtccattcctcaatcttgagggaaagggatgatgaccattctaactacttcttgctgattagggacataaacgttggttagagtaataaagttgtttagcgctttactgtaggagttccctggtattagggctgcatttcagatggagttgtttccatccagttctagagaaaggtacagagagttaacaacttaacattgtttgctccagagaacaaagggaatgctcagattttatagcaagtattcatacccaggctcccaatcaagtcttctacacaaataaatggttaaaatttgaaactcgcttagttttcattagtcaatacagctgatccctgattagctgacacaagtgagctttaattgattgatttaggtgagtcttgaaagtcccaaagttaaggagtgtgggttttccaggaactcagagcatttgtatgaaatctagttagcaaatggctgctttgtgctatttaaatttaggtccagttagtcactcagaatccatcttgaaggactggctcaaacatgctggcaaacagcattgcattccatccaacagagaagtggttggctacctgctctgggcccatcggatcccttgcaggaatcctagtggcagtgcagtggccaatagagaaactagagccatttacttaggagaggcattcaggaaagtactggttaaatgtgaaccaaagtctcttgggttaagttggttcctatttccagctggagtgagtttaaagtctcaaagattgcatgggcaggatcctggtgggaatctcttgtagacatctgttaaaaacaagttagaacaattctaaaggggagtcaaatgcttagccaaaatatgagggttatcattaagatgtgcagggtagaatgcagaagaaatcctataccaaggagaaaccagctgaaaatatctggacattggaaactttatccactaagtccagcatggaggctttccgaagatgtctctctcagagattttgccaactccaagcccgcttaaatatgactggaagtatttacccaggtacagcagcaatgttagaagtcactgagcaggccaggtgcagtggctcatgcctgtaatctcaacactttgggaggccgaggcaggtggatcacctgaggtcaggagttcgaggccagaggccagtctggcccacacggcaaaacccaatctctactaaaaatacaaaaattagccaggtgtggtggcacatgcctgtaaccccagctaattgaggggctgaggcatgagaatcacttgaactcgggagatgggaggttgtagcgagmtgagatcatgccactgcactccactctgggtgacagagtgagactccatttaaaaaaaaaaaaaaagtcactgaccaataagatctcattactgaccatagtatcttatggatccagtttgttcccaattctggtatctaatgtccctagctggtcagatttttaagaaggggaagtcacctgaatgtccctggagcatccctagtcaggatcgaggcaagagggttgggggactccatcaggactgttataacctaatattggaggaacttaggagaattcaggatctagttcagtccacaggcagataacaaggacttgaagacaatgtacagggttaaaatctaaaaacaggtgtaactttgctttccttagaagcataatttttctctcccgttgatgatgtaggaggtcttagattttagaacctcttgaggctaggaaaccaaaccaaagcagcctttggattttgcttataataaggttcttgaacctgccagaaagtgacaatttttactcattccctgtaaagctgggaactcatgaagcaaggcattttacgcactttttttttttttctgagacacagtctcacgctgtcgcccaggctggagtgcagtggtgggatttccactcactgcaacctccacctccygggttcaagcgattctcatgcctcagcctctcgagtagctgggactacaggcgtgcgccacgatgcctggctaattttgtgtttttagaagagatgaggtttcaccattttgaccaggctgatctcaaactcctggcctcaagtgatccacccacctcagcctgccaacatgctgggattacaggtgtgatccaccacccctggcctctatgcacattctgaaatatgacatttcaagccaaaccttagcaatataaataatgtttccaactggatcctgcttataaagagagagtggatttttactgaagttgtataaataaaactaaaaatatccacaaatagtttcygaattttgmaggaatcaagtagagagaaaaagcaaatgcttccatatttgttcacaaaggattatttatcaaattattgcaaacggtagatagcttgtgacagaaaatttccttggctctggaaaataaaacatttacgtcataaaaacatccttataaattaattttacgtaattaattttgttttgcttgatcttaattagcaattttggactatagctgattgcgaacgcttccaaagaagaaattaaaataataactgtgaatgacaaaaacccagaacagccataggtaaagatctgattaacgttaccaattaaccaggaaatttaagtgcttctgtggcatacaatcatccaacataaaaattgcaattattacaggtatctcagcatgtcagtatcttaggaatctcataaaatttcacatttctataaatgatgaacttacacaaacacagcttaaagaaaggtaaaacaccatttcttatttgacaatgcttctagcagtatttgccaaataagcctaatcatttaataactctacaagaaagacaagcctttggaggagcatatctagggggtccacctggaaaaatcccagtcaattttaggccaaaaggcttaatttaggatttggattctagagaaacctgccaaagatgtcaaaaagcttaaaatacttccttcaacagataataagtcactgctaagaatactactcatttaatcagagtgacaacctaaagacctcagaaagttacatggatggaaaaacttttacccttttaaggctcagtttccctaagcagtcaaagcctaataaagacaccatgaagcactgggaattatcttggtaaaacacagaatctttgttttctaggccagtgaccttgatcaggggaatacatttartaacaacataggaaatcctagtaacaaaacaattttgacacattaagaaaaaacaacaatatagaatcaagttttgctgaagtaaaatgttgcctttctagacctttaagataaatcccaaaccaggactagacagttctcaggaaggaatgtggcagaaataggaattagtttgtaattcagaatggctrttaaggaaacattgcagaattaaaaatcaaagcctcttgtaatcttactaagaacaaatcaatattttaagagactcatattgttttaatgtaggagaccaaaatttaagttttgtatcagtgcatcttaacatcaaagttccattttttccaacttttattttagatgtaggggatacatgtgcaggtctgttacttgcagtttttccaggggcatggtggaagctgctgmtgattccaccattctggagtctggaggatggtggccctcttctcacagctctactaggtagtatcccagtggggacataactggcaactgtagacataattgtttggcttgctacaaatccattttctgttcatgtagattctgccactgttgactccattgtcattcaggaaggcacattctccacytcctctgatagcaagcctaaatccaaacacaaaaatattaaatatttgtaagttagacacctgcatttgttcctccccatcatcttctgcamcccctccatatttcaatgtgaataagagaaaagcaaaagtctgtcattaatattgcttcatagtaatataaaccatttctgtatttartgtcctttatgtcctcaaggtccttgcttgaaaatcacaagcttatcattcatccataccaagcccagctatgttgataggtatttaactgatgcttgctgctgtacccaaatgaactgctgccattggtggtcttcagtcaagatgatttccagyctcctcccaaattgttttrtaaatgtgtgaaaactaaaaaaaaaaaaaaaactagtaaattcctgaaagggcttagctttgattaatggatatgactgggttcctacattttatctgctgcaatgtaatgattayattcaaaatacccctttgaaatgttcacagtccaagkaactgttactagtttccttctggtgataaagctttaggagggagagattcccatgagttccctggatgctttcctattgtaaatggatgcaacacctgcaagagtgggcttaacagccttgtggatatcagctcctcagtggcttcctatgattgtagaacctttgttgcacatcagctataagtagggatttcagcagttttaaatcagtggatgaaagtgtaaaattgtgagaaatgtcactgtcayrttaaagacttcaactgaaatcacaggtaaagctttcccaaagacacagctaacmaactgaagagcataaaaagggtttagatttcttacctcatattgcagtaagttttccatgatactacatttcttatctcataaacacaactcacacacataaccatacataaacacarcaaaagatgagaagtctcaaaacatacatgttattatattccatgttgtctgtccatttccaaatgcgatgggatgattctcttctaaggccaatccaatggtcagaagggcctttgtatcttttcaggaaattctataataaaacagaaactaacaccatgagcccctttctttcrtattactctggagtctctcttccctatcccttctctttttcactggcagcgtggtataattaagcagcataaattctggagtgagactaattcccagttctcagtttaagtcatttaacgtctctgatcctaaattactttatttaaagtgagcataaatcccagtttcattgggaaattctcagtttatgcttgtcattccaccaatgtattaatgatcacttttaatgccctatatgtcttaatctagatgacaaattatataattaccttacttcttaatagaatgagaacaatacatctcatcttaccagctcaccatgagyattacatggggaaatatatctaaaatgtctsacagggttccaggcagagaacacaccctcaacaaatgttagacatgaaaacacatctcatgcccctggaatgggatccttcttagtatttcagctttaaccctatgtagccgacctgcctcagggggctaagtatttaacagaaaacatgatccaaaaatatctcttaccagttcctccatagttgcaaactgagcaaggctggcttctaatgagacacagaacgtttgactcaatgtctaatttcttatgccttcagaaaaataaaaacatttactcctaaatctaattcagctttttgggcaagcagcgtatttagatgactctaccactggcttttcctttcttgctaawagtgagacaatcacaatgaaacataataaagaaattttctcacccattttatctatttttctgcttaccttcctgaggtcarttttgaagtgtacatatctgattgttgttttcctaactcatcacaaagtgccttatcctaagcacaacaatcgtcagtccrgtggtttccagctgggtatctgcacccttgactttctgaaatttacactgacactaacagtttcaaggaaatcaatttctatagcatcgacttccatagtactgtactttcacagggtcatacggatgatttttccatatcctccctcatattagcccttctttctcttgacaaagcaatgctgaggacctattacctctatacaagagatgatttttttaygtatacagttctctgtactttcgtgcattctcaatctgcttaagtagaagataccagctcttaaggccaggtgatttgcctgaaaacatttcaagtagagatcttactttatttttaataaaaaatgacaattctgagaggaacttgtcaggaaatagttccgtaagcggaattcctatacccatagcctttctcatatcaatggacggcaaatgcattcttgccaaggctcaaaagaagacaggcttacctttgacrttcctctgagacgttttatccaatttgacataaaatactgttggctcagctttcaaaatatccagagtctgaccaccctcccctacctagtctcaatatagcaattaaatgattattctacaatgaaagtcacatcaagacattcctctcgtacaacttccctcatctagtctccctattgcactgaaggtcaaagccaaagtctttaactgaccctcaaggttcctccgttcctgattccccatggtatcactcttcttctccatcttcactttgcttcacctacagcagcctccttgctcttcctcaaataagccaggaagagtcctccttcaggcttttggtctacttgttctctgcctggaataggttccttcacatggttcctccatctctttcaaaaggttgctgaaatgtcaycttcctaagaaggcttagttttgtcaacctattgcaacctgttatacctccacccttatttatttttacttgtgtttttctgctggaatataagttccaaagggcaggaattcttttgtgtgtattttgtttgctgatgtaattcaagcatttcacacagtgacaggcacataatggagcttaataaatatttattgacaacaaaaacatatggagaatattgtacagtttggagaacaagtaacttayctgacaaaacaatagaaagtgcaatcacacttgtagtcaggactgcaatgatgaacaagcaacaataaaccttgacaggagttactggagatataagtgctagacattgtctttgcagagttttatctgtaaaatagaaacatcagaatctcaatctcaggaatatcgtagggagaaaaaatttakcatakaatcaacactaagatcagatgtacttcaattctcctactgccaactcctttcacaaaagggcttggttcataaatgagaatwatggcccaaagagggctagagataaaaatcgaattctccccacccccagggaatcttccagttactggaaaaagagtagaaattgggatgaaaaagaaacatacacaatccagatttagccccatagtaaagcagctggttagaagcaacaagggaagcagaaaataaatcaatgtaattcaccatattgacagaatgagacaagggacaacatatgagcatctgaataaatgcagcaagaggatgtgaaaagcttaatattcatccacgatagtaagactcaacaaattagaaaytgaagaactttcttcaacctgataaagggcatctacagaaaaactacaactagcaacaaccttaacgatgaaagaataaatgctttcccccagtgacatagaacaaggcaaggatgtctgatctctctcaccaatccaatttaacattttactggatgtcctattaggggcaaaaaggcaagaaaaaagaaataaatgtcatacagattggaaagaaataaaagcattgctattcacagacaacacagttgtctgcatgtaaaattctaaggaatctaccaaatggctatgagaataaatgaatttggcaaagctacaggattacctatgttcatatataaaaatcacttatatttccatattcataattatgaagtggaaatttaaatataaaaacagtatcatttataataacatgaaagatatcaaataaatatatcaaaatatgtttaggatcagtatgatgaaagctggaaaccaaagggacaaagaaatcaaagcagacttgaatcaagagagagatataagatattcatagattggaatatgcaatattgctggatgtcaattatacccaaacaggtttagagattcagtgcaatmctgataaacattgcagtatgaattttttgtagaaataagcaaggtaattttaaaattatatgaaaaagcaaagaactagaatagccaaacaattttgaaggaaaaaaaaatggccaaatttggaaatcagggaasctgctttcgtaatttacaaagtaatagaaacaaagacagtatgatattgacaaaagaacagacacataaatcaatggaacagaaaaaaggtttcagaaacaaatctaaacgtgtatcrtcaattgacatttgacagacgtggaaagtaatcaggtaggtaaggggtaatattttctgaacatgtagtgctggaacaattgagtgtcctaatgcaaaacagtgaacctcagctcacacctaataccttataagaaaattaactcaaaataaattttagactcatatataaagcctcaaaccctaaaactattagaagaggaaaattacatttttgtgaacttgaattaggcaaaaatttcttacatacaacaccaaaagcattatcaatattttaaaaattgataaattgaactttaacgtaattaaaactctctgctagaaaaaaaaccctgaaaagggaataaaaagacaagcaaaggcagaaaaacatctctctaaaaagcgacttgtatctagaatatattaagaactcaaaactcaacaataagaaaacgaaaactagattaaaaagtgggccaatgatttggagatatacttgattaaagaggatatatgaatagcaaacaagtgcataaaaacatgcttgaaataaccagccatttgagaaatacaaattaaaaccatsagtgactactacatggttattagagtggcaaacaaaacagaaaaagaaacaactgctggtgaggaagggatgtgatatggtttggatctttgtccccacccaaatcttatgttgaattgtaatctccagcgttggaggtggggtctggtggaaggagattggatcatgggggcagatttcccccttsgcactgtgtcgtgataagagtgagttctcgtgagatctggcggtygaaaactgtgtggtgccctccctcacttcctctcttcctcctgctctggccaagtgaagtatggactccccctttgccttctgccatgaattgtaagtttcctgaggcatccccagaagctgagcagatgccagaatcatgcttcctggccagcctgtggaatggtcagccaattaaacctcttttctttacaaattactcagtctcaggctatttctttatagcagtgagagaatggacaggatgcmactggaattttcatgcatcatcactggaaatgcaaaatgttatgggcattttggaaaacagttaagcagtttgttatggtaaatgtaaattcaccacatgccctagccatcctatccctaggtatttaaacaagggaagtgaaaacttgtgtttacccaaaaacctgtaaggaatattttacaccaggtttattcattatcacaaaaaactagcaacaactcaaatatgcttcagctgctgaagaggtaaacaactattcctcagccctaataaaagaaaaaactcgatcacacattcacaattgtcaatttcttactgtgtgttagctggccaaacttttgtcaggtttttctcctccccacaggccctacacgtgtttgcccgcaagtttgcctaaatgcctcaaagcacagacttgcaaaaaacatcctgccttaacctgaccacagaccacattgcaccatttcctgctgaaacgcctagactttgcctgctctctcccacaccactaactttttttttttttttaagacagagtctctgtcgcccacgctggagtgcaggagcatgatctcggcccactgtaagcttccacctcccgggttcatgccattctcctgcctcagcctcccgagtagctgggaccacagatgcccaccaccatgcccggctaattttttgtattttgtttagtagagacggggtttcagcaggttagccaggatggtctcaatctcctgacctcgtgatccacccgcctcagcctcccaaattgctgggattataggcataagccaccgcacctggcctaacatatttttgaaatcagtgttattcctattgcaacagtccttttgaataaagtttctccctaagtccagacttgtttttctttgacaaatgatacatactataatacagatgacttgaaaatgcattattgctaarkgaatgaagtcagattctacatttacctactgcaagattccatcgatgtgacattctggaaaagcaaaagtgcaagatcagaaaacagatgagtggttgccaaggsctagcggtagaggaagagacattctacaaagggacatgagggaatttcgagtgggtgggtatggctctatatcttgacttttatggtagtaacatgagtatatatgtttaccatagaaatctacaccaaaagagtraattttactgaatataaattataatactttaaaagtccctgccaactttcgtccgtttaatatacatctacaagaataacagggagcttcagcttaaattctagacagggggaaagatgggtaagattggatgatcttaagcagtaaatatcgtttggattttggctcatataaaaatatcaacctttattctttctggttctacactaaygcaaaattgtcttaaaggttcagaatactaagacttccgtaattctttttcattgctactagggtaatgtgtaactctccccttaaaacttcccccaaatctcccatttgcctctcttaataatcttctaaatgtgcctgctttctcttcttcttttttacatctctagcccctcctactaatactgagacagccaggtgggaaggggtccctggagaaactccaattagcctgcccactgaggtggagccttgggaagttcacaaggtttgcagcagagagaagcctgagcctggccccagtttttcatttgtagaacctgggattcaaactgtcaggtgggaagcgctccggcggaaggactctggccctgcaagagtacctgtttccccctttttttccctttttcacccaataaaactctgcttcacacaccctttaaaccatctgcgagcctgaatttccgtggccgtgggacaaagaatcccatttttagctgaaataaggaaaagtcctgcagcaatattcccacatgcatcttgttccacttctctcttgctcacttatttctcttctacctttcttacagtgtgtcctgactcccgcaaattcataccactctyaaggtacacactgaacacaataactcttcagacttctagttggaaaaacaacattaggaattatctctcagaagaacagakaaataaagcattattactgatcaaattttaactcagtttcaggatctgaaaaacttaaatcacaggatgcattttaaaaaacaagtttcacaactgtaccaggtaacaaatatttagtttcggttctgtaaacattctttagaatataacatttggcttagttagtaagaatataacttagtaggaatgtaacttagccaaaagttacatttgtaacatctaaaaaatgttagaacgtactgctccgggacacaaatttaagaagaccgatttgagtaataataaaactcccatcacctgcaaagccggctctgcgtgaattactctttctccattgtaatccccgtcttgataaatcggctctatctagcagacaaagtgaacccactggacggttacaacagtaccatgaatgctaagagctaggagcaacatgttacaaaarcagtggcaycccttaaaaacaagtttccccaagaaaggtgggaggaaaataggggctcaggacagttgcaaatagatgtctatcttccaaataaaatgccaagtcttcttgaggtcacagcatccacaagtttccaactaggctggaaaaacaagttggatcagagagaggttgggggagggcccgtgggtggccctgaagcaggccactaggacgccgtttccctctctccgcccttccaaaagcccttaagccacagacagccgtggcccgtccagggggcactcccctctcaggtcccccaaagttctgcaaactctgacgacaaaggcaagtcagagtcccgtgacatgtggggaggcatcgcacagatttttcttttcatggcctggtcagagagagtgctcacccaaccgagaaggccctggcggggtcacactggctaaataaaaagcgccttcttctgcttttttcggagctccaggtgacggctcctccttcactccagggcggagctctgcagaaaaggcggggaggcacggagggaggtgtactggggctgcgggattcgcggctacatgggcttctaggctctctcgcgcccaccctgccccgagctacggagccccttccggtcccgcggactccaagcctcaagtttccgccacaccctccagagaagcgtccccgccgcagccccggggggggcgggaggcgcgaggcgcggctgcgcccagcactggcsccacctcccacgcgcccgcgggagatttgcttggggctggatcccccgcmtaccgtttccccgcagccgccggcgcttctggcgcttgtgacccgagcaggaagcccagagagaaaccagaaagacaggaaggggattcctggacttcctttccacatccggcaggaacgcgaccctcctccagctaggagcgcttgtccgggtctggtggaccccttaccctgtgataaggacccagaggatgcccttgtccccgggattagggggaacccaatggaggcctccacccggggccgattcccaccctgggccacaggagctttttaggcagtgaaactattctatgtgtaatggtggatatgttataggaggcagaaacgaattatttgggtagacagggtaaagccagtccccggtagaaaactttgcttttaacaaaaagcagctcaaaaatagctcccttgctaacctcatgcagttcaaagaaatcacttttctaacaagaggcctgaaagagcagacagtaaaacacagaaaagacagctgggacacagaaggactggggtggacagccgagagtytcccgggtaatcaccaagcttcacacttacacgatgggccccagtaaaacagtgggccttaataagcacattcctttctctttaggcgcaccaagatgcctgcagcttcaagaagatgtatgggaacagacacagaaactttccctaccagataagcaggacaaagaaacacagactaagagttggcctgtgtggtcacggagtgggttaagagatgataaaaaaatctgctctgtacagatggcacacctggtcccaactaaaccctkgggccctagaaagataagacatcccctcctcacaagcccctcctcaagagccccctcctcaagagcccatttataaaaactctgacattcttaactacaacttggcaatcttctcaggatccctctctaacagagacctgttctttccttttgcctattaaactcctgctccaaactcactctgtctgtgtgtgtgtccgagacctcgatctccttggccatgagactaagaatcttggtatttaccccagacaacgaggctgctgcagatatatctcacatgtttgtcaaacccacagaatgtacaacagaaagagggaaccctaaacgatggacttacttacaatgtatcaatatttgttcatcaagacaaattgtacaacactaatgggcaatgttaataataagggaaattgtgagggaggaagaagtgataaatcagaaatctacacttgccactcaatttttccacaaccctaaaactattctaaaataacatgtattaattatttttaaaaagcagatgactttttgtcagttatgattgtttttagctatgacatagaaagctataatcatccttcaatttaacttataatttgttgatatatatatatcatatatatgtatgtgtatatatatatattatatatgtatacacacacacatactttgcaccacaggatacagtaagattataattttcttacatgataatgaaacaacctcgatcacatttcagaagtagtgccttaatagtccttccaccttttgactctctctgaggaagtatggaaaaggagatatgatgttaatatctaagtttattgcttgtgtaacaaatattttgctatgtatgcatacggataataaaaataataaaactatatagccataactatcctaatataacccttataaagaaaagtgtctatgaaaaatgagtgagtttcagtgcatcacggtggtttaaatttttttttcttcctttattttttcaaactctaaaagacaggcataaaaggatctgattgcagggccttaaatttgactaggtttcttaaatgtgtcatcacagtaaatgaaatgtaagcccatgtctattatatatgaaaaaaagttaatacataagcacaagactgttaatttctggaattgcattcagaattctcctgtcctcagaagaaaggaaatgttctgcctcatgcattattgtcctttgtatataaaggacaataaataaaggttatgtaaataagtacacagccaggattcttttaggacacacacatagaatgtaagttatttggcttttgaataaaatgattacttgcaaagtctgttgcagttagaaatgcttactgaagctgactcaaatctttcctccttattattacctagttaaataaacaaatggcaaacatttgtgtggagagtcatatattacgtgaagtgctagatggtggcatgttaataaaaggccctactagtaaaaaatgtagagtttttaaaattgaagtgaaaaaacctttattggattttttagatctgcctatagtaacatccccagttcccctgctaacatcatcatcatagcagttacaatatatctatctcttattttgccttagagtggtattactcaaagtgtatatcatggatcagtggcagttcatgaactatgtgttatcagtccatggtgaggtaaacacagactttattagtctgttttcatgctgctgataaagacacacccaagactgggcaatttacagataaagaggtttaattggacttacagttccatgtggctggggaagcctcacaatcatggcagaaggcaaggaggagcaagtcatgtcttacatggatggcagcaagcagagagagcttgtgcaggaaaatttccccttataataaacattaaacctcatgagacttactcactatcacaagaacagctcgggaaagacctgccccatgatgcaattacctctcactgggtgcctcccacaacacatgggaattcaagatgagatttgggtggtgacacagccaaaccatatcacagacattgagagtaagcatttaaaaactcatatagcaatttgacatttccttaataaccaagtgggtgaatccaccttgttggacaggaaatagacaagtgtggtaccatcagactcagtggtgggtcacttctgacatgagtgtgtatgagtcacaacattaagaagtttgggatcttaaggttattttctcaactacaatccaactgtgcataaaaatctgaaattcacatattaccttcttgcaaaataataacaaataattgtgaaatttacaggataacttgttggaaatagttattgatgatttactgaaaataaaatttgaaaacacggcatcatttgcattatttggggtaagatttaaaaacaaataaccttaacttgcagaaattatcttaaaatttctttctctgttctcttgaatatagatctttgaaatcagttctacttttaatggtaaatagaaatacttgaggtactctttctcttcagtgaacagaatcttgtcataaatgcaacctcgtaagctcatttctcacattacaactttacatattaatataaataaaatttattcacagtgtgggtgtaggcatttaatataggaaatacaatttcatacttaaacgggattagttacagtttttttttcctttcttccattttgtttcttaattgacaaatagtaactacatattcataaagtatgtagtgatgttttgatagatatgatgtacaacaattctattagggtaattagcatatctatcatctcaaacatttatcatttctttatgttggaaacatttaatatcctctttctagctttctgaaacaatataacatattattgttaactgtagtaatcctacagtgctatggaatgctaggaggtattccacttatctcgtgcacagtggagaaacagaaaatggttttttttctatcacatcatcaggctgaacattttctaaacttttatcctctgtttcccttttaaaactgaatattttaacagcacccaagtcacctcttaactgcttcaatgcttagaagtttcttctgccagataccctaaatcatctccctcaagtttgaagttccacaaatctgtaggctgcaataagtctacatggtttccaggaggtgaagcctgaacccaactggcagcacacaaagcctagaatatcctctttcctggtaccaccctgtgccactggactcacggtgtgagatgagtgactgcacaaccacattcaacaaaggaggaggtacaactgggcagagacaacatcacaactagagaagattacaaaatcattcaagaggatgctgagataaagtacagttacctactctccattattctttgctgagaaaagtgagggtatggcatcagcagaaaattatgtttattcttaaataaatcccaataggatggggttgatagtcaggcagtagaatgagataaaaatctgcattcattaaaaatctttgtgcataaggaaaagaacagcaatggcaaaggagaaaagagagccttctctttttcttaaataagacaggaaactgcattcttttccttgctgtagtggcagcagacttactggttttcataaaacataatttctgcaatgtggtctgttgataaggctgctccatgatgggaggacagacatgaggccaagtgttcatgacagaactaggtcttctctcaaagcctctaatgtgtgctatttctcatgaggaacctgacactatatgacacttcagttaaagcttctgaaatattgcaatggcataattgacaggttttttggtgtggtgactttcttgtacatgtaaactctttgagaaaagttggggataaaaggacaggggagcatttggtttagagccacaatgttccagacgccagccacggatccctctgccctgtgtcactacacgttcttttctgagaaacattcaattgctgagtgttacacaccgtggttgaagaaaatgatccactcaccaccatccgctctctctcatcctctgtgtgaagctcccaatagcagaggctgaagacagaaaggtcgtctctgtttccttgcaccaggtacattacttggtgacctggtgaatggcatgggcaaggtagcccacgttgccggaggtgacccctgccacagaaatgcggccgtcctttgtcatatagatggagaactccttggttagccactccacctgttcaggctttagccctgtgaaacaaaacatgccagtttgggcagtgctatgtggccagttgtgggtggaacccttcttcttgaggttggagacaagctgagtccgcatgctaatgatgtggtcggccatgcctttcacttcttgcaaccattgttttcatgaatctggggtgttcagaatggtagaagcaatctgggccccattgtggggacggttggcatacatgggatggatcaagatcttcaactgtgactctacccttttggtttcatcgcatctttgcatactacagtgaaggctcctacacgctcacaatataagcccatgttcttggcatatgattggcagagacaaacattaatgccctgttcaaagaagtggtgcacagcccgggcatccttatcaccatcaccactggtaaagccttggtaggctatgtcaaagaaggcaaagagactcttcttcttcaccattgttgctgtatccttccactgttccagacctgggtccactcccgtgggattgtgggtgcaggcatgcagaagaacaacattttgctctggtatttttgaaaggccctccacagcgcctgtgaagtcaaaatcgcaagtcttggggtcataaagccgataaccttgtagctgcatgccagtgtccctgaagatgggcgtgtgatttccccagcttggtttgggcagaaagacatctcagctgaacttaaaaaatctttgcagaaagctggctccaatccttaaggctccagttccagaaatggtctgcacaatgacaaaccggccacttttcaagacttcgctgttctcaccaagggctagttctgcagatgccttgcaaaattcagccagtcccccaatggacaggtattccttgtccaaactttttgtggcaatctgggcctctgccttggggacgctaggcagcacgtccaaggctttccgttatcatcccggtaggcaccaactcccagattcatctttttgctattggtgtccctcttaaagtcttcaatgactgccaggatgatatctggaggtcccatttccacatgggtccatcaggagctggctctggcagaggccgcagctgcgaggcccaggtggaaggtggcagcgatcccagagaggacgcagccagagtgcagcagggccacggtggacagtaggagggcagtgggcagctgcaggactgagcagagggctctctgtagtgttttaattgcgagagacgatttgtgaggctgatctgaagctgtagccaatctggtctgctttgcatgtctttctgtatggtccatagcaaatttgctgaggacctccatcttgtttaacatccttgggagcaagacctgtaaccacttggcaaggttttgtgtagcctctgtgtagcttggattcaatcctggcttagggaatgagtcttacctggtttgatatctgcatgaccttttgctatttgttgattccatttctctccatgaactgccttggattttcctttctctgagcctttagtaaagtttgaaagccagaaatattggccacttggtgtggctaaattcagataataagggagttaagaggaatttcttaaggagtgctcagcttaactaaaagtggatatccaagttagagtcatatttaaaaggtttcccttttcttggaccttgttttgctgggaaaaggtttttcttggtcaactgaattattttttcttcattttgctttgccacttttttaatgcacgcacaaga

SEQ ID NO: 6938 - DNA, 12694 bp, Homo sapiens
  misc_feature (1)...(12694): n = A,T,C or G, or insertion/deletion polymorphism (see Tables 1-2)
tgaagttagaaactgtttcttgccttgaacaagttctcagaccaagtcagaaggcagagttctcgtgtatccaagtaaactcaatttttctttggtgcccacttgctgttatgctattcttcaaatccctagtgagacctgaccagctcaacattctgacatgcatcttcatttgttataaaaacacattactcatcaaaatataagcacattcccatacagcgtatttgatataccagggtgcagccaaattctagatgactcttggttgaagacaacttgaactactccttctaacacttttagccagttctgcattttgatagcattctctcaaatgttaaagtaacatgtaaaggagcattgtccattttaggcatcttgttcatcttttataatatcccacgaatctctttttcacttttctcaaataaaagacagcttcaagctgaaggagttttctattttaaacacaattattaaagtatattggtgtccagtgggctcaatagaaatatgtgaaaatttatttttacctagttggctaaaaggttcaagaatatggcactctctcttttacaacctctttgaaattggaatcccaaaagtcaagggaaagggctaattcacatctgtgacctattggcccctggatgacagggactaggtctcattcactgctgtgtccccagtgtttagcataaacctcacaattttgagaaactagacaactctagtaagcactcaatatataattattgaataagtaaacaaactaatgcaaagcatcaagctcaacaaaataaagcataataaatggcaatgttgggctgcgatgcattctgggaaaggagcagcatcaaatccaagacggcaccagcagaaggctgatgaaggagcttgaagaaatatgcaattgtggaatgaaaaacttccgtaacttccaggtagatggagctaatttattgacttggcaagggcttattgttcctgacaaccctccatataagggggccttcagaatcgaaatcaactttccagcagagcacccattcaaaccaccgaagagcacacttaaagatctgtcacccaaatgtccactaaaaggggcaggtctctctgccagtaaattagtgctgaaaactggaagccagcaaccaaaactgaccaagtaatccagtccctcacagcactggtgaatgacccccagcctgagcatccacttcaggctgacctagctgaataatactctaaggactgtaaatatttctgtaagaatgctgaagtttacagagaaatagggggaaaagcgacttgtagactaaaatctgccacaattggctccagtaagtgtgagcagagaccccgtgcagtgcattcagataccccacatggaaggactctgtggaaactgacacgtgccaccgcctaccactttggcagttaccaactttctacagttttcttaatcaaaagtcgtctaggcaacctgtaaataaaggattaaaaatttaagatgttctaaaaaatgaataaaaataaaaaataaatgacaatgtctgtaaatgaaacaaactctggttggaaaaacaaaaatgtggtgttgaaatattttgctgtattttgcctcataaaattttattttctgaagcaactgttaaaatgaattaacatttaaaagaactggaataacacagattattacttcatcaaaaggcagaatcacgaggagaaaaggagattcctctatattccaatcttctcttgctaggggacaatttgagtgggaaatcttttcaccatttaggtctggagtgtcctgttaataaaatgcaatgttgaaatggctaaatcacattggctgctatgcaatacatttttttagctacggcattgcttttacaaagtagcttttacatacttagcaatccagcaggtgataaatacatatgttaagaaggattaatgtactttaatggaggaagtaggaaaccaaaataaattccatttaaagagattaactgaatcttttgtaacaagacctcttttaaaatgcatggaaacagacatttgtaaactctcttctttcaaaatgtaatgtggtaattccaactactcaggaggctagggcgtggggactgcttgaacccaaaagtttgacaccagccagggcaataaagcaagactccatctcaaaaaaaaaaaaaaaccttaaaataaaaactttaaataatgtaacgcaggttaccctttacaaataaaattttttagtgaatttaagaaacaccagtatcatcaatattagaaattacgtaggtaagtgcctgcattcatatccaaattcatgaaaagagaaggaaaccattcatgttttgaaaaccaaggcataatattaaaatgtcttaactccaagttactttggagtactttattcagaaaagtctgttaacaaaagtaacatacctaccacagaatttttgtaggttacaatattgtcctcttcactaatatttccccctggagacagagtttcgctcttgttgcccaggctgttgtgcattgacgcgacctcggctcacagcaaccgccgcctcccgggttcaatcgattctcctgtctcagcctcctgagtagctggaattacaggtgcccagcactacgcccggctaatttttggtagttttagtagagacggggtttcaccaagttggccaggctggtctcgaaatcctgacctcaggtgatccacccgcctcggcctcccaaagtgctagctaggattacgggcgtgacccaccacctcttctagaatggacagtcttaatattactaatggagttttaatatatggttaatgggctcctcgctgtgacttcccatctcaggaaatgacagatccatctttccaatctctccgaatacaaatccattagtgtaagagaatgtaggaaaaaccattgtttctcctactctcacacatcactcaacacttctgacaccagattcttcaacagacaccagctgagcatcgtctaattcaattcaatcctaacactatccacctggacatagcatcacccctcagtccctcaagactgcccccctcttcagatgccaattccaaatcccaggttgtgacctgtatttcgaccaaccagttataaatcagagatcctataacccacctctttgtgtttgattaattttctagagcagctcacagaattcagagaaacatttcatatttatttacccatttattataaaaaaattacaaagcatatgaatgaacagccagttggagagctgcatagggtgaagtataggagaaggggtgcagagctcccatgtcctccctgggtggttgtaccaccttctaggaacctccacatgttcagctatccagaagtcctctgaaccctgtcctttaggttttacatagaggcttcaattctacaggtatgactgactgtatcactggccattagtaatcaacacaaccttcagccctgcagaggttgagagatggggctgaaagtcccaatcccctgaccattctggtgaccagcccccatccagaagttacaaaggggcctccagccactagtcgtcttattagcacacaaaggatattcttatcaagggttttaggagctgtatgacagaaaacagggatgaagaccaaatacatattttacaatatcacaattagcaaattcaactggctctactttaagaatatcctcctaccaccttcactgtcacctccaagccactgttatctctcatccggatggcttgcaagagagaggcttgtctcatgctgcctcctttgcccatctgtgttccagtttctcttctgaagagcaagtgaaatgatgccactcctctgcaatgtctttatcagaataaaatccacactcctcaatatgtctggcacaggcttccagggcatttctcactgctgccttcaggacctcttatcataacactcttgcccttgctccactgatgcaccctcacctgtgagatttacgcttgctgttttttctccttggactgcagttccctcagccatccaggtggttctcatttccttgcttctttcagagaaataagcaatcgcccctttatcagtttgtgtctccctgatcaaccaatataagataacatacatctcccataactacctatagataacactcggtctgcttttcttcacggcatttattcctccaaatacattactagctgttagaatgaaattttaaatgaatagaagatttacctattgttaactggaattctaaatgcttagggtagagtctggcacatagtaggcagagaactaatggtccctaaaaagtactgacaaatcaagaagagaataagatgatgtatacctggcatccaggacacaaactccagtggtaacaagaactctgtccccactactcaccaaccttgttcccgaccttccttgaacgtgagattacctctaaggatcagccttctcgccaactgttggcttagataccatgaaatataacacataatgaagctcgaggaaagcagaaaaataatgttttccctcaccccatnnnnnnnnnnnnnnnnnnnnnnnnnnnnnnnnnnnnnnnnnnnnnnnnngttttccctcaccccatctcaaaacactcaacacatggttcctcactcagtaggcactcaataatacatgaccgtctgaaagcatgaccatttttattttactagagagggaagcagaatgagacagatgacattttctcacgacttaagcttatacatttggaaggaagaaagcagttgtagtaagagaggcaggctcttcaaattctcacaaaacacaaattcctagttttgctttggatgggaagggcttcatttcaggcacgttgggggagaaagggcgaagggaaaaatgctcagactatgctatttttaagttatttggtaagaatggctatttttccctctgatattcttgaaccacccaaatgtcatgtttccatgcactgctgtctggatgctatcaaaggcacggctctgaggtgaaaggaaggagtcagtcatatgctcatcttctcacatgctgctaccactgctgattttttttaaaagctttgtgacctagaaaggagatgtacggtatgaatgatgcacagactgcagagagcatagggcgtcatcagtctatttatacctccaggaaggaaaaaatgagtacagggcaatggctctatattccaagtactgagtatgcaaagattatctggaagaaacaataaacaacacagtgagggcggcatttatgtcatcagtgagaaagaaaaggtgaggccatattcccatgttccttgatcgttccaaaattctgttaacttttaaagaatttcaagttgatcccctgatatttcccatgactgtataaagcatcccaaatctgagttaaagacactgccacccatattttaatacagcttcacctcatatgtgcatatgtatttacatttagcaataatcgatatccatttggctatactgtaagtcccgagggaaagtttttcagggttaagaaagtatttggaaaagccttacagttaattatgctacttaactccaaaaagggggaaaatgagatttacacagatttatacaatatgatagaaaaaaaaattttctcaaggtgtgtagttcatttcccttaagatgtgaaatctttccaggacaaagcagggaaaaagcacccaggcccagctgctaacagttattcctggatcactagtaaacttaatgccaggcttcacctctcgacttccatttgtttctactgtaagcagtataacatggagcctaacagaaatgatgttctgaaacgtacccattttgctcttttgcaacccgtttacttgtgcaattactgccagtttcacttgctttggagttattttactagcagtggcgatggatttgatgacagctggccacagtatgaggtgttttctaaggcttgacattaggtatttcctagtgcaaaatttactgatcccgcgtaggctccaacctagagccaggattccttaatggaacacaaactgatttactttgaatatactcaagcttcacagcaaacacttcctgtttctattactgtccaagtcttcttaccatgcctgaggcagacaatttaaggcttgattcctcaccctttcccttcatctgctgaaatcccatttagttttagtgcaccaggcatgcastggtatttcatcctatgcattccttccacagcctgacctataaagggctgacactgagtcctggcttgttcagatcagagagaattaacacttttatttctttratttcaaaagcttctgaggtaacttttgagctcgtaaatgtcaataatttgttgtcaagacaattatattcttaacccagctgctacatayagggaacatagagactgacagaaagtcagtgaatttagaattaaaacagtaagtttatctgattgactatgcttctcaaaatgtaaatggatgatacaaattaatacaaccaattcattttatttggtttggttttggtttttgaatgggtttatgggtttaasagacattgctctctgttgwttatgtgtattcagtgtcagaaaggaaaagtgagcagtgtgaagtcttattagatggaagacaggtctaaggcacatggaaaactgatattcgtgatggacaggtcaggagctagagagcagggataaagaaagcagaaaagaaaagaaaactcagctacaggtactctgtaagtgaaactaacaggtacttgataaatattggctggttgattacacaacggaggggaaaggaatggcatgctgtatcatctttaaagactcctctacatgtgccacactactatgaataggaaatcaattttcctgtgctcaataattgtagagctctcttgtctcttaacttcctgctatataaaccagtcctgcaaggtcctccctccttcttttccttctctcatattgccacaggggagctcaccgaaggagtctgcctttaaatggagataaacctagcacaaacaaaatcagttgtgctttcaataggttattgaagtacaaacattcagagggagttttaaacactttggcaaatcttctgagaggcagagtaatgatgttccataagaaaatttgctaaacgaaaataagtagaataatacctatttctcttttcaaaaagaaatttcattttcatggaagtagggttttttatgatttccatacttaatccttaatttatgctaatgcctctgtttataattttcaacataattactgtggggcaaaagaaagcaaagggacctatacagacatatttaatgtacacacagcaaacgaaaagagttagtcttatgcaatttttaaaaagctagtcaaaaaaatgactagtcaaattttttgaaggaaacagatatttattttcgatttcctaatttcatgtctgtatcctcagtcacactgacagtcatcattcattctaaaaaaaaatgaggtattacccaaatagcttatgtcagcattaattgttaaataagtacatttgtaattcctcctgtcagccatatccccttacgtatctatgcagatagtcaagctcctatatccaagttaggagttaggaatacagtggtacagtttatcaatatccatagataggacagagtaagatttcctctcactaaacatttattttaaatctccctcaaatcaatttctatataatttcttgcaaaaagaaataaaaaccagcagttactgctgacaaattaaactaggggcaaatacacattaaatatatacatttatatatttacatttgtatatgtatatttatatatacatttatatacttacacctatacaggagcatttcattgtagaattttgactcattcaaactctgttcactaccattaactgataaattatttatgaaagatgatcatgacctccattaaaaaaaaggatccctcaaagcatgatatatttctaagaataatgcaacctattttctgtgacactgctttgttcttcaacactgtcagtggatgaacgatatagttttaacacatttttgtgccatggccatgaaatgcttacatttattgtgttaagtttaagcatatgcttcaatattcagttttcaactgagataatgattttaaaagatacaatctcacctctttaggattgttttagttttcacttccaaactgctacatttgactcgacactattacaaactactagtgaacataaatttcaaaagaattgtcttacaatttcagatctttaacccattgcagtggtgtgaactaagtatttccgtgcgtctcccactttcagccacgtggtaggatggtgcttccctgtctccttgacatttggtgaggccatgcgaggtcagtgaaatgcatgaacaagtggtatgcatcactaccagccagaagtgctgagaaccagcgtgtgactaccatgtgctctccctctcctatgtgattgtgaaagaacatgtcaagtggagcttccttcagaggtaactatgataagcagtcttcccttcaatctacacaaacatgagggaaatcttttttgttgtaagccattacaatatttgtggttgttgttactgcaagatagcttagcctatcctaactaatagacaaaacaggtcatgaatatgggtcgcacactggaaatttggggtaaaaaatacattacataattttaaaagccattttaatatggaataggtagtgtcaatgactgaattccattttggtgtagaactacaaatctggaaacagattttcaaatttttatgaagaagaaggttaataagcagttcaatatttcacaagaaatgagaaaagcagagcagaatagatggatccagaaatgcaaaagggtcatccaggaggaggcactaacctaaggaaaagcagaagaatacagcaaggagatttcagagaaaggaaagtagttacaaatgaagctatagagattggcaaggccttgtacaccatgggaagaaacaagaaatgcatgctgtgggccccggaggatcataagcacatgcactatatgatcagatctgtaattccaaatggtttatctcggtagtttaaaggcagggttgaagagagggatgggtgagatgagacagagtaattgggaggaacacattgctcactctgctcaaaaacatcctgtgagtgaccacagcttacagaatgaaatatccatccttccctgtagtaccaaataccaacatcagggaacagagattagtggtcaagaccccagtccctggtttcaagttcatctgctgccacatattagttgtatcatgtcctaaattctttatccatacatttctacttcttaggtttactgtgagggctaaataatttatgtaaaatgcttattttagcaaagtacctggctcttagtgagaattaacttgtcaatctaatccattttatgacccattacataattgcactattcttcttcaatactatatttttttcactcttctgctactaatgatgttgccttcgactacgtctttctcaggtctctccctgttcaaattccactcacccttcagaacccactcaatgactatctgctccatgaaggatcctactcaatgactactctactccatgaatgctccctttgcctcaggaaataatctctttcaagtctggactataacacagtttctaattgcttcatggtacttaattatatatttgcagaatttatttttctcaattatgttctattttcctttaaccagtattacttcttatgtatccattatactcccaacagtactttgtggtagtgccttgaacttactgagcttcactgttgaataattcaaggaattagatccaatcctggcatacaatttcattataatttattagtatgatacataatgttttattcatgtgtcagaaacaatttcacaaaacgggtagttttctccctccttttactcataaataatcaaaggtgagataggtgaagtcattctaaaatggcatggcatattgataaggaatcccaaaagaatatatccatctctgatggaaaacctctagctccaggagcagaaagggaagaaagctaagcttccacaatgagttagatcacactcttcatcccacagggataaagatttcacaaactagataaggatccttgtaaacaactggctgttaacaaatagttttatttttcctcagactccaccaccaagtaaacctactgttccttgataccctttgtccaggctgtagtaaacaagtactcaagaagtgttatgtaagtgatgtgacttattgagaaatagatttgcccttgaaaagaaatatgaatagaattgcacttggcccctgtagtttgatcattgtaacgtgaaaaagatacagcctatcccagttcttttggcttaagtgagcaaataaaattaaaagggacttggagaataattttgcttactgctctgatttcaacttttctgaaatgggctttgaatattaacgtctacttcacaaacttttcactatactcagtcccaagcaacccataggatcacacagccatgccaccaatttctttttccttataattacgttaaaatttaagtcttttgggggccaaaaattaaatcctaactattccttgtaaaacctggagcaaggcaatatcctacacaccatcactttttcataccccaccacaatgttaactctttgaaacatcccttgaacaggtttctctcacactcattagactcagagcttaattagatttctttggatttatatcatacaatgacttttaaattctcatcattttttatacagtacccaaataaaaacaatcagaaagaatgtacacagaaacaattatggattttgaaagttgatatcaacttagatattggtatcaaactatgtagggaaattatcatttatgtagagttatttaatcaaaaaatgttgtcacaaaagcaaagctctactagatagtgctagctgtctgttcctattttttccagactgacttatgcaatatcctgatgtttaaaactattctgtcatggaaaatctgtctctagggtggggtgagaggagggtgtcccattttctttttaaagttataataagaagcagacaaacaatataataaacttgtactttgcaaacattttgaattacgcattgcaaggctacaaggtaaagacagaaatatgcattttaaaataaaaacttagcagacacccattttgctcgcagcatgaacaatacagtaaaatcaaaatattttgccttataagcagtcagcaataaccagtgatctgaatatttttaagtgcaataggtcatatatcaaatggagttcatttcattttcctcaaatgctaccgtagaaatttaaagactattaagaaataatgataatttcccctttcatgcatataaagaatcaatgagtataataaaacttcattcaggtttttcccttttctatgttgactacatgatatgtggatataaacagacaaaattcatactgaatgtcataaatcaatgttaggaaaaagtaaatttagagtaactttccaactgagtgagtcttgttctcttcaaaaagtgaacctttctgctcttatctcttttcttgcaaagctaagaaaagccctttttaaaagtcctattgttattttctggatcattacagaaaaattatattttgaaactgtaaagatttcattttttaacattcaaaactgacttaagaatggaacatattggtcaggcacagtgactcacacctgtaatcccagcactctgaaagggtgaggcaggcagatcacctgagatcaggagtttgagaccaccctgaccaacatggtgaaaccccgtcttcactaaaaacacaaaaaaaattagccaggcgtggtggtacgtgcctatagtcccagctactcaggaggctgagacaggagaatcgctttaacctgggaggtggaggcaggagaatcgcttgaacctgggaagtggaggttgcagtgagccaatatcatgccactgcacttcagcctgggagacaaagcaagactccatctcaaaaaaaaaaaaagacaacatcttaagtgacaagagaatccacgaatcatgggtctggctcagtgattgaaagtgattattggactagaagcaaggcacatctctggactctagttgtgtcagaggaaacatgctaactcacatcatagcaagtccatatcctgtgtgataaagatgttatgacagaaagctaaatcactccaacatttctacttcacagtatgtgcctgaatgcataccatatttgtctctactatattttgcattgctttttagatgaataacttttgaaccatattttctcatattactaaatcactaagtgcaatgtcaacatctgaaaataattatttctgtgtattcgcataaccttggaatgctgagaaatgtatttggcttgggacacagcataacagccctgacaaccctgccttaacattat

SEQ ID NO: 6939 - DNA, 193757 bp, Homo sapiens
  misc_feature (1)...(193757): n = A,T,C or G, or insertion/deletion polymorphism (see Tables 1-2)
accatgaataagctagagctgtgaggcagaacagaggtgaacacaagacaggtgacgtggagaaaagcaaagtggcagagcactgaaatgaagctatggatgcctctccagtttggtttccgctcttcttgaaaaccaattgtttgcctttaacaaaaatataaacaaaatgacaaccttgtgcgtcatgacaatgagtcgctatttaaccagaggtcacagtgagctattcatgggatttaaagaagacagcaacgtaagcaattttagatagtatattgggaaagtagtaagaccattctgaagttgccctttgagccattccactgaggcctaaccaaatttcaaacaagaaggaagcaataattcttttgtttaccttgttacttgaaggggaataactttctacttaaaatattatgctagccatgtggaagatagattatgtgtgctagaatattagtaatttctttccttttcagagccaattatgcacgtttcagttacttaagggaaagtctgtataattcaacattaataaagaccgttctatacatttccaacagtaggaggaacttaaaagaattgttttgcccatggcaaagaatgccatgcattaaattcaagttaataaaaaatttgtatagttcccaatattagtaaggattacttttggatggcgagatcatggttcatgttttataataaatatatatcactattataatgcaaagaaaacaaacttagagaataattgaagacttgtttgtttcctttctatttaacaaaacagattttaagtcctagtggtctagttaaatctatatgaggttaggaaaaaagttatataaagtgtcaactactgtttttcacattgtacaaaaacattgatttgacttcaaagaagacagaatgattataagaaatagactaatctcaaaggatctaggctctactcaaagtcttgtatctgtgtcgtatattaattgaaccagttacttcatctctctggtctacatttttaaatctgtaaaatgtgaattggacaaaataatctcaaaatcccaattacgtgagtctcttaagcctttatgtcactactacttggtattactacaatattttccaagtttaacttgcaaagcttgtaagccacttgaaattatgtaaaacctctcaagtcgtttagaactacccacagaaaatatataaagcctaagaatcaggactaatggcctgaacatataatgacatgtttaactgttttggtttctctaggcagaagcctagagtatttcaaaaggaaaacacaatgattgaaaattgaatacactaaatcaaaaatattttcatgactttaactaaatagaaaaagtctggcctcaaatatagccaatgaagagaagaaattttacattactattaccagattttgcatacaggcccatactgcatcatcagaagattacagatttggattatacataagtggttgcctatttgaagtttaaatttacttgtaaacctctacttcctagagttgtaaacacacactcaccctcacacaccacaccaccaccagaaccatacacatatgtatcaaattcaggttttctagttttttactataaaataacaaatacaaatttgaaaatagcaaagtattccaaagcataaatgataataattaaaaacaaaatcttgatacaaaaaagtaggaaaatgaatacagataccaatagggtatagtttgtttcttttaaaagtttacataaaattctattctatttcattaaaaattaaaagttcttttttttagaagaaacattgggctcaggaaaattaaacacctgtaagatattgaaaacatttaagtttgcaaagttataataaatacaaagtataagatgccaaagcaaatttagtgtgcatgaacacaacaccaggaagagtcatcctatttccaccaaatacattccctcaatatctatagtaagatataacccccaagaacggtagtaaaaaatattttttcctagcatttttggaggctgctgggcttgctgatattagcaggttggtctaggctaaaaggaggatgtgggagaaacctcatcaaagtgatgattcaaaattcataaataaatgaacacacgggggaacattttaatcactcccacagtagagtaaatgaaataatggcagacacccttaacgaactatacagccaaggaagccacaagtaaatacaatatatccaagcttcttccaatttaaaagttgtattaagaaatgcgtacataggccgggcgcggtggctcatgcctgtaatcccagcactttgggaggccgaggcgggcggatcacgaggtcaggagatcgagaccatcttggttaacacggtgaaaccccgtctctactaaaaatacaaaaaattagccgggcgctgtggcaggcgcctgtagtcccagctactcgggaggctgaggcaggagaatggcgtgaacccgggaggcggagcttgcagtgagccgagatcgcgccactgcagtccggcctgggcgaaagagcgagactccgtctcaaaaaaaaaaaaaaaaaaaaaaaaaaagaaaaagaaaaaagaaatgagtacatagtaagagaccttaaaatgacactagtgcaaaatagattggaggatatggataacaaaggaggacagcatctcacttttacaaagatcttcagctcccattttcaaccttgggctacagtcttaattcatacggcatccttccagtatcatctgccatgcctgaaatctgtcatgagaaatccatatctgaaacacggcagattgatcgcatgcttttattgtctctttcacgtcaaaactcaagcaatgacaaatgaatacaaatgaggatagagaaaagaggaatgaatgaacaatttctacaaatttttggagaacagaatacatggtagagtcaaggcagctacagtctaagtgcttactgaagggggaccttatgtcgcgccataaaagtcatgagaagcaccagaagtaggggtcacaaaaaagatggggactgatcttcatagagcgagatcaactgccagatttcggtctttaccccaagcaatcaaaagactaccccatccctctaacagaaaagagtttattttctggcaaattcaaacctgaaaagctacactgaagtatactaggcatagcagtgagacttgggactgacaacctaagactaaaatgagaatgtacatgttgaacttggggcacccagcaccctttccctgccttgcccccagaacactggtagcaggtgtacatcttccatgtaggagcggttggcagtcttctctgggtgtgtggggagtggagtctaaatacatgtacctgaagcaagctctctgtctaatcttgctaacacaaaatccaccaccaaaaccttgcccactggcagggtgccttcttttttttttttttttttgagacagagtctcactctgtcccccaggctggagtgcagtggcacgatctcggctcactgcaaactctgcctcccaggttgacgccattctcctgcctcagcctccccagtagctgggactacaggcacctgctaccacggccggagaattttttgtatttttagtagagacagggtttcaccatgttacccaggatggtctcgatctcctgacctcatgatctgccctccggcagggtactttctatcagtttttagtgattcactcattaatatgaatgaacacagaagaatcttaaccgtagagaaacgcctccaacatgaaatgggccaacacgaactggctaaattacctcagaagaagtagtggcaccgcagcaagcagtataccaccaaaaaaaaaaaaaaactgcaaataatatcctcacagtgagaaaaaatggcacatccatgagagtaacagtatgctatgaagaaggggcaaaaagacaacttaaaaagagctcatggagctaaccaatatgatcacctaaattaggatgggagttgggggatcagcaaactgtttctgtaaaaggccacgtagtaaatattctaagttgcaggatttgccatctctcaactctgccattgtagcttgaagacaaccatagacaatgcataaaagaatgcacatgaatgtttctttatttacaaaaacttaattttatttatattgcttgacccagtggtatcattgctggatttgattgtgccataatcttctgacatctggccaaaatttgtaataaataaataaaagattggatcataaagcatagacattactctgtaggatggaaagagataaagagatggaaaataggaaagaaaaaccaaaggatcaatccaggaaatccaaaatttgtccaatagaagtttcagagaaagagaacaaagaaaaatgtggagagatcattttttgaaacatacaatacatttgtatagaactgaaggacacgtctccatatttaaaaagctcactgactgcccaaaaactaacgaaaaaaaaaaaaaagcacgaaccaaagtatatctgtaaacaatttccgaataccaggagggaagaaagtatcatacagaggaaaaaaatagatcatacacaaagaaataagaatcagaatattgtctgattctctacagtgacagtggtatgggaagacagtaattcaatgtctcaaagattctgagggaaaattatttaccacccagaattatattacagcaatctatcaatcagtaatactggactaaaaaacttagacatgaaatttttatttcacatgcaccctttcctaaaaatctattagtggaaggtgcttcaacaaaatgagtggtaaactaagaaaataaatacatggaatccaggaaatagggatcctgttctggaaaatggtgaagtactaggtacatagctagaattggatattggagccaagaaatggagtgctgcaggcaaataggattatctgaaatgcctgagtgtttggaaagcttcggcatttgacatatatatatatataatatatatatatacacacacacacatatatacatatatacatttttttttttttttagatggagcctcgctctgtagccaggctggagtgccgtggtgcaatcttagctcactgcaacctctgcctcccgagttcaagcgattctcctgcctcagcatcctgagtagctgggactacaggcgcctgccaccacgcccagataattgttgtatttttagtagagatgggatttcaccatgttggccaggatggtctcaatctcttgacctggtgatctgctcaccttggcctcccaaagtgggctgggattacaggtttgaactactgtgcccagtccttgacatatatttttaaatgttgggacaaacaacaagccctagatacagacaaaaaagcaaatgtaaaagaggtagagagagaaagaaaataggaacaatccttaaactgcaagaaaagcaaaacgctgaatgagaatggcaacacagtctagtacaccacttaattcatcagtgtctttgtttacacagtgattgtgagtcatatcgcctatttatttaatactgtaataataacatattaacatgggaagcagggagagtaaatgatactgaatcctcagttaaaatagcaagaaattaaaatatcaacaaaattcaaaaatattataagaattaaacagtagctaaaataaaatgattgcacctaaaaagagtaattggtaagaaattgagagggaagagcaaggatgaatgtttttaatacaggccttttctcctatttgctttttaagctacagtatgtgcataaaatgcagttctctgtgcttccttaatactttccatttctcagactcacctattaaatttcaagaatcctgagaaagctaatactataagccattatcagctaataccataggattcatttgttgataagtggaaaaatgtccaaaaagaactgggtcaccacaggcacctggagacaaagtggaaatgaaagaaaatcagtaaggaagaggtaaggaggtgctggggggaaattgaattgcaggacactcagttgatgtccagagagttggagaattggttggtatggaaaaactccacaccctggtgtcagaagtgtggagtatataaaaaaacaattttcttttcctttttaatggtggccaatgaaaacccaaaaggagattacatctaaggtgacaggattatgtgagttgctccctacttgctctccaacgtcaacaactcagaaagggatttttctggccacagtatcaaatggtcattgccctcatccttgttagtcttcttcacagcacttattactagttgacattgcagtgtgtagctatttttattttttaccatctcatcaacaagaatgcaagaagtcctccagtggaaggcactttgtcttattcwctactgtatccccagcacgaagaacagtgtaagagtttaataaatactcattgaataaacaagttaattttatttttattaaggatctgtggcatttgctacccgggactaagtaaatttttgctcgagttacaatattgscacatgggggctctgctgttagttgcaagagtatcctaagcattccccaacattcttaagggaactgttcaactgggaatggccacagctacagctaccaagtactaacagtataaggaaggatccwctggtttgacatataggctgatatattttagagtaatataaggacccacagactcctgttctctgctacttcattgcaaactatgcagggattctcatttgtcagaagtttaatatctttcagatctgggccctaaaataaaaacgtttttaaatcagacattgtttcagaaacaaaaataaaaccaacctatggcatagctgtttctttatcaaaatcaagattgtctattatctttctcctcctggtgactggggaatttaattcctaacgctgatataattgccaggaagtcgaattttaaaacacaccagtgtatccagttgaaactattatatacagtgctttaaaaatacaatatgaaattttcttcaaaaactcttgtcacctcagaatacatgtgaagtggatatagcaaaatgttatgataccatttaaagaacactgactgactttacattcaaagcacagtcatagatgcaaagtaaaacatcaaatattaaggtataaatttggttaagaggtttttatagtccctctaaaagtcttttctccactgtgagaaaatacaggaaatttaggaatatatataaaactagacgttttacaatgtgactctggtgccacatgtttcttgatggaatttgttctgaaagaaaagctagaaaactgatttctctcagcttaagtgactacaaatgaattttgattgctatcctattaataagaattttttgtgcctcagttagatgaacacttcaatggcaatacaaaaattagcagatttatttagcaagtaccaacaacaaataattgctgttgctaagggtaaaaaggcaattgtgatgggatgtgaagaacagaaatcctggtgatatgaatgttaaccaataaagttctcaaacttgccatttagcgcattcctgaattctctgayggcataaataccacaaagtagaagtacaactttactctaagctctaagtcctgtattactcaaaagttcttcaaatcttaaactgctaccaagaatgaatagatgcccmaaatatccactttggggctggatattctgctcaaattaatgaatagactcttgttaaacatatatgccatgaaaactgactatgtgcaagttaaagcctacaatgggaaaaccaccaaatgcagaacatggaaaaagctaaagtccaaatgacgtggcatccaacacatcaatggcattacaaaatgaaagagacttcaaatacatcaaaaacaaatgcaatgtgtgggctttttctaagatcttgatacgaacaaacctacttgaagaacttgttaattttattaggtataataatgctagatggttaaattaaaaggctgttaggaatgcatcctgaaatgtgcatgtgtgtagatagataaatagagagagagagagaggttataaagacatatgttggctgggtgcggtggctcatgcctgtaatcccagcactttgggaggctgaggcgggcagatcacaaggtcaggagattgagaccatcctggctaacacggtgaaaccctgtctctactaaaaatacaaaaaattagccgggcgtggtggcaggcacctgtagtcccagctacctgggaggctgaggcccaagaatcacttcaacccgggaggcagaggttgctgtgagccgggatcgtgccactgaactccagcctgggtgacagagcgagactctgtcttaaaaaaaaaaaaaaaaaaaagacatatgttgaagatttgcttttaaaatactccagaaagaaaaaaatattgcacttatgtgggaagaggtgtgagtatcgacgaaataaaattagcaaaatagtaataatttttggagttgatatttattatactagcctctcaacttttgcgtatgctttacctttcctactgaaaggaagaaaaaaaagtatttccttgaagtcatatagtcttttcagccttcataagtctgccactgaagtttatagtgttggctagatttctgtattcccatatttaccttaggactacctttgcaggaagtgacagtgaggaatgcaataaaacctgagaatatggattgacgctgctgcataaatgtatcttcaggtgaatgggagggagacatgttggataaccttgcaatgtctcattcattaaatttgtcttttcccagaaagacactgagagaccattttaatggtcagacctggaatattctttattcatttatctaagtcagagatattcactcataaccatatgtgaccagacagggtttttaatggagcccttaaagcaagcagatggaaatcaaggatatttcagggaagtgttaatgctctgatgaagatctggatataattacaaaagtagacatgcatatgagtattctaactagaaatgaagaaaattattttcacagctgtaggaaactctatattggcattctgacaaccctgatatattgttgggtcacaaacattaaactctttacaaaagctaaatcaaatgcgtctattggtgaaagtactttataagcgaatacacagaatatcaatggtgtattctgtataataaatggttgtggtattaaaattagtagaaaagaaatactgaggaatgtttcctataatattagtaaattctggcatgtccttggtcatgttcatgacccttgataacccttaatatatgctcatggccacagaacctatacagaatcaagggaaaattaattttgtcatagatactctgattgcagaamtatctgtaacactttataaatattgtacaatgtacttactcataaatcatgaaaatggttcctaagtaaaaatccttaaaagtttataagtcaggttttataagtcccattttgcagatgagcaaactgagacccaaagaagtttgcacagaatcagttccaaattccaaatgtcaactgacatatgcaataaacagtacatgtgttgagtccaaatgtttccttacctagtctttatgcaatctcgcatttagattttcatcaaatcttttggctctactgccctccaaggccatatgcaaaratgttgcctctgtctagttcatttgaatggaaatccatttgctattgtttgggggctaattttgcaaatcatttcataactttctgttcaaaaactacctttaaaatatttaaaaatayatcatggtgctttgaggcttaagattaagaaatattttcaagaactaaagtctcataaaaatgaaggaaagcaagagccaaatccagatttaatccaaatgtgttaaactcttggtcttgctcacaaaatgtgacccacgaaaacagttatggcttcaccatcccyagggttgcttagccaataaaaatgaaccatctttactttccctctttatttcatacctccacttctatttccttagaaaagttctgttgattttattgtaaatatatcccgaatctaaccaatgctcaccacttccactgctaacaccctggcccaaacaccatcatctatctcctggattgatatggtggcctcgttactgtgtcccctgctaagagtgatcatctcagtcagtctgtgcttctataaacaaaaatactatatcctgggtggtttaaacagtaagcatttatttctcacagttctaatggctgggaagtccaaaatgaaggtaacagaagacctgatgtcaaagacagcctgatttctggcttcttaatagctgccttctcttgtagcagagagagagaagaagcaagctctctcatttctgtctctttttatccttataatcccactgatctgtcatgagggctccaataccatgacctaattacctcacaaatgctctatctccaaataccatcacattgggaattggggtttcaatatatggcttttggggacggtaaatgagaacatccgatccacagcagtgatccttttaataggttatttgatcacatactaactctgcacaaaaatctccagttagctccccgttttctccataataaagccagtattcttagaatgtcatccaaagccctccatgacctccatctccaattattctatcacttggtctctccattctagactcattggcctccttgttgttcatggaacacatgatctgcttccacattaggcctttgcactggccactccccatatatacatttaagtctcacaagctcatatccttcaaggtttgctcaggccagtttcttaatggccctaaccatcctatttaaaactcagcccacctcataccttgcactcccaatcttccttatatttttcttttttttcatagtacatatgacctactaatatactgtatatgtttatttttaattgtctgtcttatccctttagaatgtaatcttcacaagggtacaggcctttattttgcacacagatgtattcccagtgtctggaacagtgtttagcacacaatggttattcaaattaaatatttgtaaaataaataaaatatctgaagtcaacaactgttaagatatcagtccattctctttcagttatgaatttctaagtttatatctggcaactcagtttcatattggactaaaatttggcagtattgccaaactgagatttgatttatttacccaatytaaacaaaatatgtttagctatttgaagtcctataagcacaataaaataaaaagtctttagatacatgacactatttttataattgtataaatcattaaggccctggatgcattggggatatttaactcgtcaggtagtttacggtttgttctgtatgcgatattaagtgcaaaagaagttgctagtttctaaatacataatgcaatataattttgcttctgctgaaaggcaaatcagaaataatcagctcgctatagtcgacaagtaaaaggagaaaaaacttttaaaaagtatacaggcaaattactaaaatcttttagaacacagtcttttctttttctcttgagggactactctatgtctttgcagtaacttcygcagcctcaagtattcagtgtggcttagaatcacattattttgttttggatttctcaactagcctcatggataatcttccctcttcaaacaatttattatcytgaaccagatcagacctggttgtgatgccgacttaaggggtcgtgccaaagtaggggccatacacagttcctggaggctgactcagtccaagagtggctactgattactgttgagaaagagattgatggtcagtatttttttccttaatattatttcattatgaacatttttccttgtcaatcaatacattgctaccaaagcaatttttgttgtagcacatcattcctgtcatatagttttgttttatttttattttattttttatttttgtgggtacatagtaagtgtgcatgtttatggggtacatgagatgttttgatataggcatgcaatgtgtaataatcacataagggtaagtgtggtatccatgcccttaagcatttacgctttgtataaaaaacaatccaattatacttttagttatttttaaatgcacaattaattcattattgactatagtcaccccattgtgctagccaatactaggtcttatttactcaytctaatattttataccctcagttgttagtattaagactaaataaatattaatcataagatccaaagggtaggtgtaaagtcagaactatgcagtaagataagatcaggaaccaagataaaagaaaaatgtctgaaaactaagagcaatgtgtgtaacacagcagagaataatattcaccgtaaataattcaagaagatttatcccaggaaaagcaaagtgagagcccacattctcagtgggttcctctgttcttctgtcaatgggaagtaaagtatgatgagcaagaagcacaaagttaatgggtcctccagcctcctggagtggctctctgcagctcttgggcaaaacagatgtctcaatgactacgtgggagagtgaggggaaaactcagagcctttcaagcaacagaggtgtgagagagaagttatcaatataattctcattagtctgtttttgagagatacaagttgtcaagcccatttgggatattaaatgataagggttcagtattacccttctgtgctgtgcaaaggagaatagtcaaaagcatatttactgttctcatgaaatttgtagtttaactatgaagacaagatatctgtgaaaagtaaagatcactttctgatcaactaagttttctcactttctagtttttgtctttgtatatacctcctttaagaatactttctccaaaattgtttccagtctcactgactgaggaaattttcaggactcaatcccatgtacaaatgttgaacattacataatcagttatactatatccattgtacttgtgactgatataaaaacatatttttttcaatagctatttattgcatgtctgcaatgtgccaagtgctgttgtagatattaggaaaaatgaagtagacaaaacattgtctttgtccttgtggaacttacatctcagtattataagtgtgcaaaccctctcttcctactaggagaaaatattatttttaatcattccttcacagtgagtttcttaaacttatttcatcagagactattgaaaagcacacactcttccatccccctagaatgagaatcctgggggagggattgggcagtctatctttttaagaaactcactggatgtttcatgtgcattcacagcttaggtaactctgggggaaagcactgccctattaagaacatactgcccaaggaattggtaatatccattgtactatatctgtaggaccccttttgattgtcattactagcctttatcaaacatctcatccttggagaatgtgaaagctctccacggttttccacagacagttcacctaacaaaaaacaacaaggcaaactttttcaagaataccattatttttaaataaaatgcctctacatggcagatgttattatgttctactttggagatgaaaagaatcgaacattattagtyatgrtccacagaaccagaagatttattttaaagataaagttcagatgatgaacataaaggaagttatctcatcaaagaaggcaagactgagtaaatctcagaaatccaccatgtacaatatttaaaaatgctcactaaagttgttctttgtgagttaatgaaggtcagtatagtcaatattcagtacgtaatcctagcaagtacaaataaagttaatattattcaaatatcttacacaggcttattgcatgcaacacactgttctaagtaacatacagatattaaaatgacttaattctcaaaacatgaagtgagtttttgtttttatgcccgttttgcagatgaraaaactgaggcatagggaaggtaagtaacgygcttaaggttacatagctggtaaattgtagccaggagttggaatctaggtgccaaaatctatgctgttaatcactaaactacgctgccttagtttttatacttctttaggaacctcagaccaaaagaaatttaggcaattctaatagaacaagcaagaatttgctaatcacagcttccttgccccaatcctttaatcggcttcattttcactgacttcttttttaaatgaagataacaatgttgttgaacaggatcatctagtggttagtggttcggcataagaatgactcgcttctgaagctcagctctagcactcgcttgctgtatgaccttgagaaagttacctccccaagtctgtttcctcatctttaaaagagaggttataataggacccacatcatactattgtttaaagagaaaacaacgtagcccatttaaagcacttagaaagtgctccataaatattattagtgtaataaatagcagcaacatcaataaagtatgaaccaaatgatctcttgattcgtatcctaacactaaaaatggtttatttcccttctaattaaaagagaattacaacaaccaaaacaacaaacgaaactatagccataaaatcaattatatcgtctgtgagaaaaccggaaaggctattggacacattaattcacttgtcatcagtcatcccctctattccaaaatgtttgtgttctaacatcctgagacaccttgcataatataatcactgtgactccaagaggtcaaatgggcaggcagttaatgcttctctgtgaaaagctcaataattcattttataaatttcagtttaaagcctgcgttgaggttaagaaaaattgacgttcggtctgtgaacttaatgtcaagctccagaaaaactctgggcagcacatgtttagcaattaagtggacacagacaataaagacgttgccaaattgtaaaacaagacttggaaatcacagaaaatgttgctagttattgatcacggtgaccattcagttcctactgagccacccaaaagaaycattcattttccagcagagagcctgctcatttgcaagataaaagagagacatttctgcacatgcccataatgttcttcaccactgggggcagctttacataagaytgcattcactgaaaccaaagcaacagtccgagcagctttcagaatgacagtctgcagaagtgagctgagcgtgtgcgcggtacggggctctcctgccttctgggctccaacgcagctctgtggctgaactgggtgctcatcacgggaactgctgggstatggaatacagatgtggcagctcaggtagccccaaattgcctggaagaatacatcatgtttttcgataagaagaaattgtaggatccagttttttttttaaccgccccctccccaccccccaaaaaactgtaaagatgcaaaaacgtaatatccatgaagatcctattacctaggaagattttgatgttttgctgcgaatgcggtgttgggatttatttgttcttggagtgttctgcgtggctggcaaagaataatgttccaaaatcggtccatctcccaaggggtccaatttttcttcctgggtgtcagcgagccctgactcactacagtgcagctgacaggggctgtcatgcaactggcccctaagccaaagcaaaagacctaaggacgacctttgaacaatacaaaggatgggtatgttttgtcatttttcttctttccttcttaaaaacaaaaaacaaaaaacctctagtgtgtgtaataattctgccttaattattttagagattaccttgctctgctctaagactatgaatttatttgcttagtggcatgtttccktgtttaactatttaaaaaaacaaaacmctaaagacaattctctttaattacaaagagataatatgtgatgttaagtgttatttagatttaaatttttaaaaatgaaaaatatatgcctatttttgcttgattaaggattaattcttttttggggggataacttttctaagttgtttttatttccaggtttcaatgtaattaggctactgagcggatcagctgtagcactggttatagcccccactgtcttactgacaatgctttcttctgccgaacgaggatgccctaagggctgtaggtgtgaaggcaaaatggtatattgtgaatctcagaaattacaggagataccctcaagtatatctgctggttgcttaggtttgtcccttcgctataacagccttcaaaaacttaagtataatcaatttaaagggctcaaccagctcacctggctataccttgaccataaccatatcagcaatattgacgaaaatgcttttaatggaatacgcagactcaaagagctgattcttagttccaatagaatctcctattttcttaacaataccttcagacctgtgacaaatttacggaacttggatctgtcctataatcagctgcattctctgggatctgaacagtttcggggcttgcggaagctgctgagtttacatttacggtctaactccytgagaaccatccctgtgcgaatattccaagactgccgcaacctggaacttttggacctgggatataaccggatccgaagtttagccaggaatgtctttgctggcatgatcagactcaaagaacttcacctggagcacaatcaattttccaagctcaacctggccctttttccaaggttggtcagccttcagaacctttacttgcagtggaataaaatcagtgtcataggacagaccatgtcctggacctggagctccttacaaaggcttgatttatcaggcaatgagatcgaagctttcagtggacccagtgttttccagtgtgtcccgaatctgcagcgcctcaacctggattccaacaagctcacatttattggtcaagagattttggattcttggatatccctcaatgacatcagtcttgctgggaatatatgggaatgcagcagaaatatttgctcccttgtaaactggctgaaaagttttaaaggtctaagggagaatacaattatctgtgccagtcccaaagagctgcaaggagtaaatgtgatcgatgcagtgaagaactacagcatctgtggcaaaagtactacagagaggtttgatctggccagggctctcccaaagccgacgtttaagcccaagctccccaggccgaagcatgagagcaaaccccctttgcccccgacggtgggagccacagagcccggcccagagaccgatgctgacgccgagcacatctctttccataaaatcatcgcgggcagcgtggcgcttttcctgtccgtgctcgtcatcctgctggttatctacgtgtcatggaagcggtaccctgcgagcatgaagcagctgcagcagcgctccctcatgcgaaggcacaggaaaaagaaaagacagtccctaaagcaaatgactcccagcacccaggaattttatgtagattataaacccaccaacacggagaccagcgagatgctgctgaatgggacgggaccctgcacctataacaaatcgggctccagggagtgtgaggtatgaaccattgtgataaaaagagctcttaaaagctgggaaataagtggtgctttattgaactctggtgactatcaagggaacgcgatgccccccctccccttccctctccctctcactttgctggcaagatccttccttgtccgttttagtgcattcataatactggtcattttcctctcatacataatcaacccattgaaatttaaataccacaatcaaygtgaagcttgaactccggtttaatataatacctattgtataagaccctttactgattccattaatgtcgcatttgttttaagataaaacttctttcataagtaatcccccacattcgctgttagcctcctggtgggaccaaatctacagttatagaaggtttgcacctcactggcaaatcaaggaaagaggtgaatgattccaggtgctcggagcttgagctgattcttggagatgactcagttatgggaacattttacagacaggcagagcctttaaaccaatgcctgacttagaaaagaaaattgcaggaaactatcaaaagatggtgctaggttaaagcagcaccctgagcagtttccagaggtgtctgaattacagtaaggcaagcacagggacaaagtgatgaagggttaaaatactgcaagcagacaactgcaaaatgtgaggagatgacaaaaatgtaaagttttcgactcagccttgtctctgaaacccatctctgtaaaatcagactasaggtttcactgccaatttcttctagcctgtatgtttcataaataaataaatgaaacagcattgagaagccagatttctccaccacacctcacattagttagggagttttcagataaggttcgcgaatgggaragcagcttgctacaggcatgtggttgagagcttaccagaatttctctttccagttttttcgaagaccctaatgtagttagtagaatccttagctctgtcctgttctgttcagaatttgtcaggctgccctgttgtgttccattacatgtcctgcacacaccagtcccctaatgacagacacttcattcasatgtgtaaagagaacacattccaagacgtgccttccacccacagcctcattgaaaaggacgactttgataacaccttaataaatgtayaaaacgaatcttagaggaaaaaagaccaacactatgacagttctctgttgcttttctattgctgacattacaatgtccctgcgttcatctgtattgtgaactcatccatcagtacagttctgtacagaccctgttggcaatctgcaagctgcatgcatgtttttatgtcattggtgaaagtttattgactgcagcacgaatatcatagcttccatatttgagtaacttgaaccacagtcaattaaggtttttagaaagatatatttagtctgtattctccttcatcctccaaaatgaacagttctattatagaagcaaatatcaggaactgcaacattgaggctgtttcatttaatttggcttgccaacccctacatctttaaccatgtccctcttctctgaaaacagaatcactgcagcaacaaagaaaaagtgaatggctatttttactaatttttttttattgtttgggggtttttcatatgctgagaggaaaaatctaggcaagtcaccataaaataaaattttaaggatgccagatyattaaaatcatacttttataagcaataaagaaaaagaaatagttaaagtggatttctcaaggtactttgatattgattaaatcttacaatagatgccacttcagaaaaacatcttagttacaatgtttacccatgaataattgttgaatatacatgtattcatgacaaaaagtcacatatttccaatggattaataatgcagatacttcctcacagcttactggatgactgagcttattgtgatttttttactgaagttgtaactttacatttttcataaagcatcagtaaatacatattccatcttaaaaagaaattttctttggctagcctcatttttatctgtactaaagatgtttgtattaatgaaatgcagtcttaaagtgaagaaccccatttctattctttttcacttaaccttctgccttacttgtgatggataccaaatatatttaggcaaggaatacttatatttttgaattattgcaaattctcaatgccatggtgctactagtatatataaaatatgcttgctgtattgaaaagcattcctaaaattcaaagctacttggaatataaaatatgatataacactaaatgaatcaccaatattttgaaagctgtcactttttaatgcctaactttactaataaacataataatagataagaacgaaaataaaatcccttaggtggtaaaactcattttgatttgggacatgaaattatgggaaaaaagttctttctttctcctcactctttgagaatgaatcttctgtaattctcagtatcttctgagcacagatatataattyttgtagatttaataactagtttaccactgtaaattttaaaacgccaactgccagtctcctgctcaaaagttgttgcctcacctccatcccatggtactttytggactacatatcataaatctatttgtataagtatttcaagttcatgcagattagagaaatgtgattgatatttatttttctagtacgtatttacataaaatattggacttccctcaaaggtgacaacagttaaaaaaaaaaaaaaaaaaaaagcctgacctgttgaactatacaacagaacacagaatactttgctttaccaaaacagagaagaaatgggatttagtctctaaacttcatgtgagtttttttccatttttattaaccccagtacacayagtgctaccacagcatgtagttaaatagtcccagtgccacagtcttgtaagcaatacttatgcaagatatattgcattgaaatgagtttgtattttccaaggaygttgacattacatcttttcaaagaatttaaacaattttttacttgatttggtgagtgaactacctaagtagacaggcagtaaattgtctttctatggagcagcagtgacctctagtgtctggttagactaaccacagctattcacacattttagctttttatcctgaatccttatgtaaacgtggtttacaacatgttttttgactagtaaatcagatttgaattttatttaattcatttccttgggaaatataattataatgtaatttttgaatgttatacttttcattttgacttttatagtaatgctggaacagaggccatagaattggtactgaaggctagaaataagtgtccaagatgaaaagcgagtaataacgcaataagaatagataagaaatattttagagtgcttatactcatcgatgctggctaagcattttgatatttttattaaaggggttaatatttttcatcagcaagatacatgtaatttaggtaggaaaaacaaattttaatattatatcaaaagagtcagcatcagtcatttactggtcagggatatgtcaaaggtgtcaaaggaggggggcctccccttccggctttagaactctccagtttgctgattgtgccagtgacctgtgctttgcctcagcgctttctccctccctcccccttttcagccagctgaacactggttctattaggctctctgacaatgatgttacagtctaagaggtgatgattcatggataatgaaattatgctctccttctggggaaggataatgcagagtcagattcatggatttggcaagaggttttaggatgctgtaggtgcatgaaatatctcttcttcccttgacatttaccaaaatgagaactcaaatcgtttatttaaagtgtggattagactgcatcagaaacaagcatcaggtcatgaagcctgagataaagtgagttccagacatggcaagtaagaatcgagccatgagaaataaaaaattcagaatctgtgttgcttcatctattcctttttgctctggattctcattagaatccagatctgtagctaacccacggagttttgctattgttgtattctcctagctacctacactaaaaatcagaggcagttgggggaaacaatgagcacaacagaatatataggtaaatttgaatgacacaagttttaagagaaataaaatggatggatgttaaatagtttgtatcaaatagctctaattaaaaatgaattaaagaaataataataatacataggtgaaagtcactgctttcctaatcataatagcctacagaattggacccaaattcttttagcctccaaaagttggtgatgattttggatacttaatactaccaataaaatctaaataacaataatttatgattcttttgcatttgagggaaatatcacagccaggcatggtagaataygggccttagaaattaagacctaaattcaagttcctttgacacttgctaatcaagtcatcacaggtacatttcctggcttttctgaatttgaagtttctcatatgtaacacagatgtgtactattgactgctcatggtaattgggaggacgaaatgtgaaaagtactttgtaaactctaaaatggcaactacctcttcttttcaaaaagcccttagtgagatactgagtggggtttgttgttctatgtttggcatgagccaaaaagaaatcagtaacctccatgttacagaaccccaagcccattttacatcattagaagtctagaacatcgtctttgactttctgttttcacataggcacagcttcttccacctcatgttatctaagtctatgatttttatactgattatcacaatgtacaacagacataaagacaccgaccagcgaacactaaaacaaataattatcaaacacattgaaaattctacttgtatttcagatcaggcaactatagcaagggctttcaatcaggacgtttacctgtccactccctttctagtatcattgtgttcaatccttgttgactttacactggatcaatataatgtttatatggcaacatgacatcattattgagcaaaaagtaattgcatataacatgttactgtaggattagcacgcattccaggtatcagtcacatgatatctgctctgatgtttctcccctggccactccagtggaagactgtgcccaagatctcctcttagtatagaaattactattgactttatcaattataattattgaaaaatcactggataaaaaggggtataaatgtacagggacttccttttatatgtcattgcttatgcaaaattacatcattaattcatcaaagaatgacaaaaggcttcctccgctggatgtagctgctcttaccaatatgaagtagcaggtgtattttcaaaatgtttgtcatttaagaagacacagactgttcctctttgacagctgagttcctatggcatatctaaagatcagagagaggatgatggtttttcaggtggggaagcagttgtgagttttctgacattttaacttcatagggtcatgaatggacgctcttgagttagggatcctgaacacgtgaggaaaattccaggaacacagagagaacaggaatatctgggacatgatataagaccaagcaagtacaatgtattttacaattatactttctaacaacagaacttctataagcaataataatccattttattgaaaaaaaagaaaaacagcttctatcttatcmtttccagcaaatgttgtaatgataattaataactttattaacaattctccatgttttctttttatttttaagggctctcacttctcccaatcaggattctcatttatcctttctctcactcttaaattgttctccttatttgaaagagtctgtaattcctatatcaccaaaaaatgtcttcctttataaaccaacacaattcagtcatttggctcaaaagagcagcattatctccaaaagaaaagttacacacttgcattaaatattaggacataaaacaaatttaaagctggctgacacttctctttcctctacaatctataaaacacctctacagtatattatgatttgcaattgaaaaaacaggatatatagttgaattacagtcttacaaagtattaaagcttactgttttcctccttaattagctaattcctagaaaacaaagtataggactttatgtataggggtactcaactatatttcaccaatcagaaacactctttccaacaatcagaattttgtcttctcaagggtaaaatatagtttttttggcctggcatataaaatagtaaggcaaatactacatttagcaaaggcaatttttgttgacatttcatcacatcaattacatctatgcagggtggaaaatacattttgtcagtaaggaggcaatgacttcaattaaatgtaaatccttagtcagcattcttggtgctaaagcttattaatgaagtgggagcagaatgaaaatgtcatcagacagtgaagctacagtatcatgaggctatgctaccttgagtggtgttcatagcttcaactgggtggccctcatgtagctaaaaaagtgctccttgtcattaatattgatctatgtactttctaaaagaaagaatatgcttaccaacagagccctcatattgactgtcttcctataagtttccctcattaatatttgatgcagtcaaccagaatctcacaagagctttaaaggaaacttgtagaatgcatcatgttgatattgaaaaagtagagtagcttttaaaattctgataaatgtgtgacaagattacaacagtgaaacctctctaaggtacaacagtgaaaatagttataacggtgaaaactctaggaagtttaccatagtgaaaactctccaagaagtttaaaattcagcgctttgagattagtgttggcatgtacttgtcaatttatgaaagggattttgcctaatgtattcaaaattttaatgtgaaaggtataaatacttggtttgtttactggcaccaatagagggttaggtaacatcactgaattatgattaaaatggaatatttaaagatctttctaatatggcagaggacatattacatacgtatttgtatttccaccaaggtacgtatgttgtacatgcctaaaaaaatatatatatattttcctattaggtgaatatttttcctataatgtgaagatattttggtataattgagtccttattatgtaccaggaatttgtatatattatctaatgatttgataaaaagtgttttatgcgtttcgtaaactcagatagttttccttaaaatataagaacagagccctttatattgagtctgtcttcctgtaagtttcactcattaatcctatacattttcacttctttataggactgctctaaaataatttataccccacccacaaaaggcttctcaaagccaaatcatgcatctccagatccctttaggaaataatttccgatgatttaccattagaacatccctctgctagttaaagtctaatctgccagtatagtgttccttccagcctgtggcacccactccagcctatctcatgtcattcattaaaaagcagtaagtgtttagtcttttggacttttacagggaggactaagtaataaaatgtaaaaatctacatatatttttatgggctttactctggtcacttttatggtctaacacacacagatgtgtggagtctttattagtttacactaaaatgcaagagcattaagctagatatagacgaaaagagaaagtcaaagtagatttcaaaatagccaaaagctcacattatacgtttcttaatgttaaaaaaaaaatcccaaatgatggagatcctgtaattcactttcttgaaagctaatttaccctcctctaagtttgccatcacattcttaaatttaagctgacattccttctattttcctatttctaataggttttcctggtgtttttttgtttgtttgttttttggttgttctgttttgtttctctgttgttttctgcctgcagatcttaattctttgagtgcactgccttgcctgtttttctagaattcccaatcaaatgttgatcctgtcagaaagtcacagggtcagtttcatggttggagtcatcggacagatggactagattgaactctacagcgcaatctagtcaactctgagatgtctgccttgtgtcttctcagcatcccatttccatgtattttctctatttggaagtagtatccatattgaaattcctccatccagtggtgcccagagctttcttggtttcttatgcgttatcaaatatctgctcccagagygagagcaggattactgtcccttccaagggcactcacctttaaatagagatgaaagtcttcagctaaaggtaagaaagttatatattaagagcaggcatagccagcagggttggggaaagttcttcttaggcaaagacctttgtaaagcactctgaaatcatcctctatagattcctcagtatttttctcaaacatgagtttgggcctttccaaaggagccaaggcagggtaaataatccatgtttcattcaataaactatatttgagaatttttttttcagtgaatcgccattatacaaagtctttctccttaaatttttttcatggagagacaactttgtataccagaaagaacttggactatggatccagtttgaattctgtttctgggattttagtaactgtgaaaccttgagtctcaacatcgtcatcctaataaaaatgtgtaaaacaatgtagttatcatgggattgttgcaagaaggcaaagaatcagcatttgttaaatatttttcctggtacatttcatatataatctaatactcataaagatcctatgaagattcaatgagatgatgtagataaaatcatttaatacaaaggttggcacataatactttctccttcccttcattagttccaactgctaaaaatctcagtaccayaatgcgctttgaaagtcatattacactacctatttttattttgaataacagactcctggtggactttccggaaatagaatctaaatttccataagctcaagggcatctgggcacgtagttaatactgaagagtgatggtagtacataaaaccaatgtcctcagcctcccaacaaagcccagctacaaccacctttattgccctaccctttcccatgctctaccactggcaggttctcaaagtagcccatgcttcccaatctctgtgcttttgatcaagcaatttcctttgtgagaawtgcccttcctccctcccaagtcctccagtcaatttctgagcttttccagaatagatcaaattctgctcactccagatgtcttattaatcttttccttccctcttttctgttttttttccccctctcccagagactgcatcacagtctaccttatgttagagttattaaggggtttgtatcacgatttgaggaaatggataatctcttcttttccttcttcttccaatggtggctgatacagtcttttatgcatgatagatgttgttgaattgattttctggtcattattatgaagttattattgcaaacaatctacagtaaacatttcaactctatggaaacttaattgtatcaaccttatatttctttgtgtagtcataaaaactttttttagttttaatttaatatacactttttcactatgtacactcttctcatttaccatttaacgggcttcaaaaattatagctgaccactaaacaatgtgagggtcaagagaacaaaccctcccatacagtcaaaaatccatataatattttactcccccagaactactaatagcatattgttgaccagaagccttactgataatataaagagtcaacccatattttatatatgtatcttattctgtattttataataaagtaagctagaaaaatgaaaatattattaagaaaatcataaggaaaagaaaatatatttattattcattaagcgaaatggataatcctaaaggtcttcattcttggcatcttcatgttgagtaggctgaggaggagatagagaagcgatcggtcttgctgtctcagggtggcagagtcggaagataatccacgtgtgagtagactcatgcagctcaaacccatattgtccaaaggttaatcgtattcttaggaaaatacagttttaaaggatcatgttctgatttaaattgcttgtgtgttgtgaataatctaccaatcattttttcctgtgatagttaccaaagctatgaacatttggagggatatgttaaagggaataagagctacaaaaaattgagacaaagaaataatatttaagtctagctgcgaatacaccttcatttttgtagaggctaggtagtcaacgtttgtttaaaagccatacatttgtgatctctccccgtccacatcctcctgagaaaggtcctttgctctttagcttggatgtctccttatctcagccccagttctgcaaggattcagctttagatgcattctgaggcctctcctctcttacccacaccaagggaacaccctacgctatgacagaaactaggtcttggcctctgattttacgcgtttccaaagtaactactctactggaggcctccaacactcagaagctgacaagtagtaatgctcatcttttttacctcctaaaagctgatcatgcagaaggcatgttagatcatacagaactgaagcatcttcccttttctgagtctctcctttcctcccttctgttcattcctttattcctttgcactacatttctttttctctttctcatctccacttaaaatttctttcaatttttctttctatccaacttttaagtcaatccatacaacttggatatatgccttcaractgagttaaaaggaaaatactaatagttttatctctcatgaaagcaataattaaaatgacaccatctaataatttaatgtaaaaggagggaaaaattctatttgtattcaactcttttgtttgggcctataaatgaagaactataattttgtaaattatagtttaattttagaaataaaaatgacctcttccctaatatattttaagttgcattttaattacaatttgtaaggtagggcagacttacagaccatccatatcccttttcatgtgaagtatctgtcagcctctggaccacagtaaactttgtcattcacagagtggattcttttttggaacatacgtgataaacaaattgaaataaaacttcactttagttataaaaacttgtagttataaggacttttgagaaccttgcagtccattttttttaccttctatttgaaattccaaactaatttcattgtacttgtaacaatcttccaagaactgcaatcctcaagttctctctttgttatccacttcatggtttcactgtggtcactgcatcattttttacccctatacgcatcttgcttaagataaacccagtggttacttaattttttttttaattcttctttgttttcattctttttaaagaggaacagtaaaataagtagttaggttttgtgtttgtttttgctttcagtactggaatctgcttggtccaacttaggtagagaatcttgggctccagagcgcatagtttgaaaagatggaaaacgttgttctgaaatttgcattaatctactttagattcaaaaattccacataggctgggtgtggtaggtggctcatgcctataggcccagcactttgggaggccgaggcaaggaggatcacttgagctctcaagaccagtctggaaacatagcaaggcctcatctctacaaaaaatgaaaaaaaattacctgggtgtgatggcacatgcttggaagctgaagtgggaggactgcttaagcccagggaggatacagtgagcaacgattgcaccactgcactccagcctgagcaacagagcaagatcatgtctcttaaaaaatatatgtatattttgcatagagtgtctcatgatgactgaataaaagaagtccagtggttaactaatctataattaatcatagaagcaagaggtttctgacaaaatgtattcagcagctttaaatatgaaacccacaaattatatttccagaggtcaaatttgcatataactccttgaactatgactatctcctcacattcaactcagttttaagatccagcagtgtgttgtacaaagtaatcaatggctaaattattcccattttgttagctcagttcacagtagcccactgactggtttaaacaaaaaaaaaaacttatctgatcttcagtttgtatttcaactgtacccaagtgcagatgccatctctggtaatatgacaaaacagatttaggtttctaaatgtttctgtatgctccaataacagtatgcagcctgcagtaactatatcgtagctcaaagtgttgtaaaaaaatgcaactgagtttgctgaagaatcattttagagttaattaaaccttctccacctgtaatttaataaaaaaaagaaagcccaacatactcttaaagacgatgggggaaaggcagtttaagaaataaaagtcctctgtttatccagggaggtactttacaaggcagacagctwcaccacagtagagagacaatatttcctcagctgagtcggttaattaaaatgcacagttacaacagactttcttagagcctgcagctgaatgactgaagtctccattttactccagtgtcacacagaacatgaagaggcaaacatactgcctgaacacaatttgactcactaaaatccagcactataaacacaaaatacatttctcgagtgcattttaaaagacttattatcaagatttatgacataaggatagaaataatttgcaactaggcactgccaggagaatatcttaggttcctctcaaggtaattttaagtaaaatttacaaataaatcttaaggttagagtccactttgaacgcaggaatcttcacctctttcctttcaactgtatggaatttgaatctgacaaacaacctgtctgttgctagaatttataagtgatytgaaaaaaaatcaaaggccataaaagctatttgtcaaataaactgcagaacacgatatcagtctgcagggctcatttgcagaactcatgatgagcatgggaggaggggatgctaacagctgcagccttgaccgcactgcccgtgccagccagaattcaagccgcgtgagctgagtgtggctgaaagagggagcacacaaatgacatcttagaagacaaaagcaaaaaatgacaaaagaggttcttatatccaagtttttattatatcagtacatcagcatatacagaggatgacctaaaaaaaccactttaagatagatgggccggcagagttttaaaggttttcaaattaagtctgttcgtggaagacttactttgatttcatggtgtaggagggagatcgtagacttcgaatccactagacctgaagttaaataaacctgggstgcagttttggttagcctggtagcacggcatggtatcagtttcctcatctgtaaaatgggaacaatacttcatgtcccagcacaattttgaggataaattgagataacatatgtttgcaggcacagcaggtgtcagtaaaagttagttttctcctgtcgtttgctagatattttcacaatgcagcaagttgattcaagtggtgaagtggaaattctcacattaaacacataaattgccaagtctgcaatatataaaaaatgattaaatgtccttgacgcttaccaatcattattaaatcaaacctgaaaaggatctaccagcaatttgcaagcccgttattaatatcctttaatggacttgctctattaagtattcttctgtaacaatgttgttcagcaacacaacagaaaaattctgttgttagtattgtgtttcttctagtaattcaacatcatttccattttataaacattacttgagaaattagttccattatcctacaaatctctctttaaaacattgccataatgtctctctctctctctctctctctctctctgtgtgtgtgtatgtgtgtgtgtgtgtctgcgtgtgtgtgcatgtgtctctctctttcccttttttctccttcctcactttctcactctctctttcctttctctaccccaaacatggacatatcacaccttcccatactcagcactcaagagaacatgctattgttattacagtaaaccaaaatggtctgagaacttagtaactattacatttctagtgtgaaataatttaggcatttaaaggaagaaaacacaatatcaatatttatgtttttaaaaattccagtagagtctgtgaaatgatggctaaattaagcaaaagcaaattaatcaaagagttacaaaggaagaattccaatgggcacttaatgagcacctataatgtgcaggcacataggttgacttttctttcttcccagggcaaacaaaatagcttctcagggcaagggatatcagaaatttggagtcacattaataggaaaagcactgagttaattgactggctttggaaatttacttcacaaagcattggattttctcaagagacaaatttgatacatgtccttcactggagacatgaaaataattcgttctttttaaagactttgaaaagagcagagacgagaaaagctagaagagtttctaaatgacacaagatctgtgaaatgatagatatttagcataaacctcatagagctgttgtgtggattcattagttaattagttagttaatgactttgaagtgttaaatcttattagatttttttttacactttaacacatctgagagagaaattactcttaaattagaaactgactataccactcaaaaagaccatctttttatggtatatcttcaagatgctctttcctgttctgaatttttttcctgaaattctgggaagcctatctacatcctgatcccaaatccaattcccccacccttttttttttttcagtattagcattggcttccagttaacactaagcacagccttaagaaactctcacggcgaggtgttttgtataaaaatataaagatgttatgtggtaataatggcatcaagaattaaacatgctacttaaacatagttttgtacttttgtacagcaggggaaaacaaatacaggcatacctcagagatatttcaggtttggttccagaaccccaccataaagtgcatatcgcaataaaatgagtcacacaaattttttggtttcctagtgaatataaaagctatgtttatgctgtactgtagtctattaagtgtgcagtagcactatgtcaaagaaacaatgtgcttataatttaaaaatactttattgctaaaaagtgctcatgatcatctgatcctttagagaatcacaatctttttgctggtgtagggtctttccttgatgttgatggctgcagacagatcagggtggtggttgctaaaagttgaggtgactgtggcaatttctgaaaataagataacaaggatgtctgctgcattggttgactctttcatgaaagatttctctatagcatatggtgttgattgatagcattttattcacagtagaacttctttcaaaattgaagtcaatcctctcaaactctgccactgcttcatcaaataagtttataagtttatgaaatattctaaatyatttgttattatttcaacaatattcacaacatcttcaccaggagaagattttatctcaagagacaactttctctgttcatccataagcagcaactcctcatccattcaagtttgatcatgaggttgcagcaattccattccatcttcacactccatctctaattctagttccccgctatttccaccacatcttcagttacttcctccactgaagtcttgaacctctcaaagtcatccatgagggttggaatcaacttcttcctaactcctattaatgttgatgttttgacttcctctcatgaatcacgaatgttcttagcaacatttagaatggtgactcttaccttaaaggttttcaatttactttgcccagatccatcaaaggaattattatccaaggcagcatgagacttataaaaggtttccaatttactttgcccagatccatcaaaggaattatcatccaagacagcaagagacttataaaaggtatttcttaaataatactctttgaaagtcaaaattattccctgattcataggctgcagaatggatgctttgttagcaggcatgaaaacaacattaatctccatgtatatgtccatcagagctcttgggtgaccagatgcattatcagtgagcagtaatactttgaaaggaatctttttttagcactaggactcaacaggaggcttaaaatgtccagtaaaccatgctataaacacatgtgctatcatacaggctttgctgttccacttacacagcacaggcagagttgatttagcatcattcttaagggccccaggattttcagaatggtaaatgagcactggcttcaacttaaagtcagcagctgcactagcctctaacaagagactcagcttgtcctttggagctttgaggccaggcattgacttctcctctctagctatgggggtcctagatggcatctttttccactagaagattatttagtgtaagttaaagttctgttgtatagtgtaaccaccttcatcaattatcttagctagatcttctgaataacttgttgcagcttttacatcatcacttccacttcaagcgttgtgctgttttactttgcacttttatgttatgaagatggcttctttctgtaaacctcatgaaccaacctcttctaccttcaacctttccttctgcagcttcctcccttctttcagcctttgtagaattgaaaggatctagggctttactctggattaggctttgacttaaagggaatgttgtggatggtttgatcttctctccagaccactaaaattttctccatatcagcaataagtctgttttggtttcttatcattcatgtgttcactggagtagcacttttcattttcttcaagaacttttcctttgcactaacaacttggctagctatttggcaaaagaggcctagctttcaacctatttcagctttcaacatgccttcctcattaagctttatcatttttatcttttgatttcaagtgagataaatgtgactctcttttacttgaacacttagagaccactgtagggttattaatgggtgaaatttcaactttgatgtgtctcagggaatagggaggcccacagtaagggagggaaatagagaatggctggtcagtgaagcggtcaggacatatttattgattaagtttgtcagattctatggttgtagtttgaaggaccccaaaacaattacagtagtaacatcaaagatcatggatcacagatcaccataatagatataataatcatgaaaatgtttaaagatgtggcaataattaacaaaatgtaacacagagacatgaaatgagcacatgctgttgaaaaacagagctcatagacttgcttgaaacagggttgccacaaaacttcagtttgtaaaaatcataatatctgcaaagtgcaataaaatgcagtacaataaaatgaggtgtgcctgcactctgttggataattaattctgtgagaaaatagagagggagagaattggaatccaatgataattatcttattctttggaaatagtgatcacattttgacctgcatgctggaaagttgagaaaggatagcagcagcataattaagttagcaatattttaatatgtgagagacatttgtatagtttaaacaaaaactttttttgttggcatataatatacatagagaaaagtgcacatatggtcaatgtacagcttgatgaataactgagcacacacaagttctctgcacacagatcaagaaacagaacacatcagcagtgtttcaaagccccctctagttcttccaatcactattcccatacccaaggtaaccactactgttacctgtaacagcatagggtagctttatctgttttggtactttacataaacgcaatcataaagcatgtacttttgagtctcacttatttctcatttgacatcatgttttacaagattcatctatattcttgagtgtagttgtagaactacatatttctcatctctgtccctccccattttctctccccaccacacccaggcacacacatagaattaatccccctcttattcaaatgatggatctacgtatgtacttggaagttcttgataaacttcttttttcatgtattccacagcatgaatgactcaggaattgctaatgaaaattttcctacagtctcttttcttggcgctggtaaatcttaatcttagaatattttgcatttttaaaatctattcatgtacacaaccagctccaagaaggacactgaggtaatcatctttttaagttgcccttgttttcagccccaaatccctgacttttacttaatctctccagggcagccttctttctgtctctggccttcaacttagaaagccagccctactctaatgattgtattagaaaaaacttgcataaactactttacaccaaggtgttcatgcctaaatctttatctttccaaggtatggccccaggacagtgttgtaacttagaggaccaattactctctgattactctctaatggggtatcttgtacagatgcatttcttgagttgttctgaggtcccactatattaaaggacactaagaaacagagctatcacactcaatgctggttttactattagaacattattgaaattaccatttcactatatcacaaggtattttctttatgagggtccatggggaaaggggaatggttctgcttcttctacataactttattttaaaatgtgttgttatttaagcaactgagcctgccctctttgtttcccccaccctctctcactctgtctccctctcccctgctgaaaatataaaaaagcatcagagacaaacactaataaatttccagagactaataagtttctaggacttcataatttgtattttttccctacctttctcacccttggtttcacatactttttctttcattctgttttcaaatatttttttctttttttaatcttgataaatttagggaaaatacagattaactcaataaaatatactatttcttaaagaaaaaattttaatcactgacactaagttaggctggccaagagaggaaaatgcagtcatgtggcgcttagcgacaggaataggttctgagaaatgcatcattaggcaattttgtcattgtgcgaacatcacagagtgtacttacataaacctagatgacagtctactacacacctaggctatatggtataggctattgctgttaggctaggaacttacttgtatagcaagttactgtatagaatgctgtaggcatttgtaacacaatggtatttgtgtagctacgcatatctaaacatagaaaaggtaggataaaaacacaatatcataacttgtgggatcaccatcatayatgtagtccctcattggccacaacattgttattgtagtgcatcactgtatattttagggagagggctcttctcgaaattctcaaattatgcccacttggtgaactgtgatcagacagactgaaaaacctggtagttgaggcatcgtataacatagtaccatgtacaaagaaagttttaataaagcttttctgaatgcattgaccaaagatattttccaacaagcaaaatggacagaatggggagaatgtctaggaaatatctagatcaaggataggataaaagacaaatgcacttgcgtaacaacatggagatgcgtttttaagagagcagacctgttactacatgtgttatgtgacactttgtgacaactgaccgattcttattttcaatgctctcaattaaagatctactcgggaagattttattaatgtgttatttatctaagagtcattgatttatggagcttaaccataagatatagcatggctcattttcattataaaatttatatctacaggaagaataccacaaggacatggggtgttctatcctggactggtaaaccacatatgcaatcacaccaactgatgaaattgaacatattaaatgataacaatctgttatttgctcccttcattcctatgatcctattaaaatgaagtaaaaaaaatcccagaaactcaatgtgaatccataaatcataacataaagcagtccaatataatacttcagtgaaatgttcttttcagtaaaagagagggaggagaaggtgtcaagtgtgggtctcttaattaggctttgtattaattttgagaacaaagacataattccagatcagataaattataattgtgttatttttttctttgctgttaaagctatttgattaggagactctggaaaaagcatgtaatcttgcaaacaaatataacaaatttattgtcaaacattagcaaaaatttataatctgcattgataacattcctaaagtattcaatggagccattcagcaatatgaaagaatgcaggcaaatttctatgattagtatttattcaaatatatattttgccaaatcaataataaatttactgagaaactatcagttgtggaaatattatgataaacatcccctttaaaaatcactatggccagaccaggtgctgtgggctcatgcctgtaatcccagcactttgggaggccgaggcaggtggatcacctgaggtcgggagttggagaccagcctgaccaacatggagaaaccccgtctctactaaaaaaatacaaaattagcctggcgtgttggcatatgcctgtaatcccagctacttgggaggctgaggcaggagaattgcttgaacccaggaggcggaggttgcagtgagccaagatcgcgccattggactccatcctgggcaacaagagcaaaactccatctcaaaataaaaaaaaaaaaaagtcactatggccaatatgaaaattaggacctgttaggttgaaaacatccagtctgcagtgagtataggattaaacatgattggagtaccactacgtatgtttcaaatgcttatagtatgtgaaaattaaagtccattttcttatgcttggcaaataccagcagacttgctagacacaggcagcagcctccaatttcacagggcttgtgttcccaatgcacacctaaaaggatagctttctcacatgttttgtgattctaacaatgtgtgcagagaggaatggatactgtaactatgaaatggaaaagctctagatttctgagtggttcagaatcacgggcctaaagccagacattaaatagaaaacttgtcacttcacagctcagaaagttctaacatctccccatgacttaacacaatctgggctcaacctagtctttctgtttctctatgcaattactcttaataccaatatgctccaacaaaaccatgatttaccactctttgaacgtctccttcagggtctatctctaatttgctcaaattatttcttctgcctggaacattgctttttgacaaattatattttataaccaaatttaactcttacataaactattttctgatacaaccaaaagcatttttcttccccattcaactctaattgkatattattattattttacttctatagccattaaaattttctaacttgaaktatatttacttatatctataattatcttcctttcagggaaattttacagggaggaaaaaatcttacattttttttgtatcctaaacatgcttaaggcaggttttgagatatactatatgtttaataaatgtctgtttaaagaatcatatgtgaatacatgaatgtcacacttgtgagagtctcactgagactctagtatattaaacaaaagatccttatttccctatctttgtcaaaatatgtatgatatttgagatttagttcatatcataaaacattgcatttaatatattttatatatttttaataaatgtttaccattttcagttatgtgaatggctccatacagcaaaagaaccattagaaatataaaagcatcatcctatgaagtataaaattactcctgaattataagcaacctttgtagctacatgcaaaacatttattcagctgcaactatttaatccttacaaaaacaaaaaagcatgagttcatataagggccacactgtgtgaggggcatagagagagattttagaggcttygcacagtgcagggagtttggtcttaacccattttataggtaaagaaattgaggtgtaatcacatgagacagaatttgaattctgatctgtcggattcagcacctctcttgtcactgtgcagaaactccctttgaatgctagatttcctctgaatagatggtatgcttatttaaatacaagacaagtcattttgccttgctgcactgtatttatcacaaggctattgccagctttttctttaacattaaatacacacacacacacacacacacacacaactgtctttttttttttttaagacagagtcttgctctgtcacctggagtgctggagtggcgtgatcttggttcactgcaacctctgcctcctgggttcaagcgattctcctgcctcagcctcctgagtagctgggattataggcatgcaccaccacccctggccaatttttgtatttttagtagagatggggtttcaccatgttggccaggctggtctcaaactcctgacctcagatgatccatccgcctctgcctcccagagtgctgggattacaggcataagccaccatgcccagcccaacaccatatcttttaaatggcttactatgtttgaggcattgcaataatgtgtcccytaacgtatttaattcttacgacaaatctatgagataggtactgtttactcatattccggatagggaaactgggcatagaaattttaagtaatatattgaagatcacagagatagggcatgaaatggaatttgaacccaagtctttcttgctcctgaatccaaattcttaaccayactattggcttttgttcctctccattaatcctgaatgtgatttatttttttcccaaaaaggaaactggattacttgacctgctgtttgttcagaatatttattttagcatgtgaaacatttaatactacactgggaagggatctagaggacagaaagtggaggtaggggatgcatacagagataggctcatctcacctggcctgattaagttgtttacatttttcagaaagcccatctccaagtccagccctaaaataacagtgaaccttcatctttaatggacataagaccctgtctcagaactctttagataaacagagcacttttcagagagggagctagtgaccttgacaaattggctggctttcctctcattccagatccgtgacattcagcagctaagcctaatatgggaaacaagtcaatattttccagcatgctgggtccattttctccccccaatatttttaagcataagacaggtgcagaaatcacrtcaaccaccactggaggggtgtacagcagctgtcacacagccacacagtggcaaaagtctttgctaagatccaaaatgaaaagaatactcattgtaattgaaactatgcaggggacaragcttcccagatgcatacaaaagttctgaggctttgaaaagagacagatgtcacttttatactcaatctaagagctactacctttcaacagctcatcaggaggtaaaatcaaatcttcagagacaaaagacataagcaacrcatctgtagcagccagaaagtaaattttttaagctacgaagggccttggagacgattcagggtatgccgtcttgtttttcatttgatgacattaggatatcatacctaatggaaaaattaattgtgtgtgtatttatgtgtgtgtgtgtggakgcacgcacacatgcatgtgcatcatgatgatgtactacttaagcaataatgggccattatagaaggtaaatcaattaattctaagttgacattgtcatagtcaggtaaattgaggatctctctgaaaatccattttcctttataatctgacttgcaattattatcaatgtacccattatttacagccagggactcttctgcttggttagtgcttatgtcctactagttgttaaatattttgaaaattagccctgcttgtaatttattatataatttcaacaattttaagataagcctgatacaaaaacaggttcttccctggttagctaacctaagagtcaaaagccagcacagtagtgttacagccgttcagaatgcaaggtatcctttgaaatacttccacagaagacctccaagtagttttcaaaaacctggagctattaatatgattcccactatgttctttaccttccactgaagaaaacagagcctactgagaaacaactctagtgtacagagaaaccaaccagcaaaaccaagtggaagtttctattcaggtctgacctcggttatcttaatcataaacctgacccagttgagcctcgctgatgggctcataacttagttccctcaagatctttctgacttttgtgtaagcaacacacaaatcaatccagcatatcacttctgatatcacagaaaagtaattcttatgaagaaggaaatcattaattgtctttgaatgtgcacccaccaataattcaagttattaaagacaaaaatcttccctagtaaatgctcactgccggttgtctgaaatgagagagttgaaaatgaatacatgaatcaaggaggtttattttaagattttccatattttgatcaaatggtgatgattacattacattttttttctgtactttcccaacaaagaataagtcataccatcatgttcttccagaaagactctttgcttgaaacagtcttactggcacaccatagttagttatgactcatgggttttgtttttttctaagatagctataaacttcaaagatacattaccttataaaaataataaatattgcttagagaatttcatctattttctacataataattttatctttgaaacttaaaatagatatcatccagattgtgcttctgatatgttttatgacatgctgacactgtcctcctaagataatattagatgatataagttttatttttttaaaaattagcccaaggctttgtaggccaggttctagagacactggtcagttcaaatctcaaccagaagagctatgtgaccttggaaaaataacccacccattctgaaccttcatttcctctgctataaaatcaggataataataaaatctatctcaaaaggttgttaagactatcacagaagttttgaaatacaaaataattagaacaaagctggtgcatagtaagtgctcgcaaatactagctgttacttccattctggatatgtacatcataattcctaacttaaaatgctggtcaaaaataaaatttatgcctctactagtcagtaaatccagcctcttctaaacataaaatatttatttaaaataaagtttctagtatgaaatttgaaatatatagatttttcttaatacatttcagtatctgcttttataaattgaatgtaaccatatagtatttgacagacaaatgtgaatcatgttgtaaaccatatatttgaaacttatcttaaatttgttctgtgtctagttaaactaatttaaaaatcaaggttgctgcttcttgagctccttttgcagggctcctcagtgactgcagaggagaaataaaaacgcttaaaatagcgaaaataatgtgacaacattcaggcaaaggcaaggctactatgtacaggagagcatgttgtgcactacacggtcccgcaatggattacaatattaatgctgacctcttagggcaaactgtaggcactggtcatgccccatggatgaatatgaatacataaacttagcttcagttaaaattatgtcaaattgttaacagaaggaaaatgaggtttaaagtccattgaaaattatttttagataaatttggattaaaatccaatgtgctagcaggcctcaaaatgttaagtgatttcctgagaaactgtcacagcccaggtatacccttccttggcggaatcgactgctactttttcttttttaattgctgaattgttcaagtctttcccacaaaaggctgattattataggccttgggctacaagtagagaaattactggactagacctggagctgtggattctggcctaaacactgtcattggcttgtaatgtaattttgtgcagttttctcatatataaaayggaagtaataagctcagatctcaattaggaaaagtaccaagatactagacgtaaacatgctttggaaaacattggagcacattaacatatatagcattatcaaagtctttccaaatttcttatcatataatacatggtaaacaacaaaatagwaggaagacttcctctaacctctgaaaagtcagaaacttttcctaggtgcctttggtattttctaatcttactctgagtattgtttccctgaaaagatccattttattctgactcaggtacaatataagacaggaaaatggatgttatatacatagatcatcaatagagaataggaagaaaaagatamcgattattttgtggtatcattgtatcatgactctgaataatatctatcaattactgattactcactatgtaccaagcccagtaggcactatagaaatgtataatatcttattctcacaatcaccctatgatgtaggtgataaaatacattccaaatgacaatgccaattcagtaaaattaatcatcttgcatgacagtatgcatctaagaagtcgagggagacagaattcaggcacttatctgtttggctccaaagcctacattaattccagttttcctcattgcctctcataacagctggcacagagtagacactcaataaatgttggatgaatggatatatggatagacacacgactgcatgacttctgggaattagaatttataagagcaagactgaggccacctatctagactgtcacaaactggagatcagcctccattgttcttcctcttctgtaatttgaaaaccctaggttacaagagtttcttcattgatggtataaacattacccattctcctagtatttctgccttcacagatgagggatttcaaattcttggagcccattgtgtctcaccttcatcaccaagatctgactggggggtatctttctctagtgacgctacaacatggcatttggaaatttgcttaggcaaaatttagtcattctggtcatggagtagtgctctgccagaaaggggtgctcaaatctaacttgcagagcctttaagggaattctgcagaagctgacaaaaatattaagaccctagagctatggcatttggttttgttcttgtgcattttgcaaaggtacctgaccacccaaggaagaagaacctttttgcttgttagccttcatatttcctacatgtgggggctgcatctgcccaaagagttcctctttttctaattaacacaaaggtgatggataggccagtggctgtctygtgcaaatctaggatgcgtttcaataagccagacccagcaaatgattctcaagcttagtaaggtttgaaaaccactggtaagagttttgggagcagaggggattcttcccaagggaagtgggagtaaattgagccttaatgagtaggcattgcttgctatcttgttaatgtattgaccctgtaaaaccaactgatatccagagttaactggcttgcagagcttgggctgagaatctttgcaagttattgtcatccaggcaataaacaataattacattatttctactccttagcaaggaggaggcaagctttgcaggcagctagtaagagttgtcagttccctccagtgaaatgttctctgcaaaaagtcaatagtcaaaaggcayaatgctgtcatttcagagtgaaattaattcctcttattatttttacctgttgctctgttttcctgcagagtaaatctcagtattctgactgtgtttaaaagcatctgtatttttccaaagtggttgcttaactgatttcaactgaatttggcaaatcacactctaagaggagccagaaaactgatgcagtgacaggctcaacagtaaccaatattccgtttaatcctaacccttaggagatctggcaagggcctcatcctcctacgggacaaaaagagtttagaagctttttggggaaattatgtagtaagtgcacagcaaaaagaatgcctaatggctttgctttggggaaagaaaactagtggtaataaaaccatggaatgtagaagataattcaaaagggaaaagtggacaaacagccataatgctacctagctctgtctaaattgaattcatgacatgtatctatcacacatttcctgacaaaccatctcctgatgggaaatagagaataaacaggttatgtgaagtctttagtataatgttttctttcttggtcaataggaccaactttatcaaagatatctcccacagtctggcttcaccaagtaaatcaaaagaagtgagatgtaatcttttattatcattttttcctaaatttactatttgctcatttattaaattgaaagaatacatttattccacagtagaaatgagagacaagtaaaaaatactttagaagaaatatatccagaatatgtgtgtgtatatatatgcatatatatatatgcatatatatatatgcatatatatatatgcatatatatatatgcatatatatatgtttgatcctgaaggaagattacaaagttttcttgtactcttgggcatagtgggaaggacattagaatagggtaaagagtcctgggtcccagtcccagcactggtgcttaccagagctgtgccagtctggattctgtcaggaaacagatgatacactcaaaaggagtgactcaagaaagttaatccagcaaacctttgcaaaaatgtaggccgacttagggggagctggcaaggatggtgaaacatggggacagcatcagcaggatggcatcaccatcctaaggcagaagacaaggggaaaatttgctagaactgctgaaaagtgtgcttacaggagatggtcaccagcattgcagccactactaagctaggcctgaagggagccagagaaattagagttctcctttctctctccttctgccacctggacttacgcatatgaaccctacatatggccaaatgcaaccagaagcagtgagagggccctctgaagcatttcataaaggtgagcctctgtggcctggagcagggtacagaggaagggtacatagaactagaggggccaaaagcagttattgaacacacaaactatgcaattttgatcattcatccttgctggccttcagtaccagcttccagaacattaagaatctgagccagataatctcaggagtttattccatctctagtatcatttgtgaatattgaataaaagagaaaggaagaaaataaatattctaattggcccaactgatttatttgaaacaggaagatttagcaacttagcatttattggttaacaaaccacaggtcttttttycctccacctgctttcttgcaaaaaaaaaaaaaaaaaaaaaaaaaatgcctgtgcctgaaggttatttagaaaaactcttgaaagctattaatagaaagcagatttaaactcagtctctaaaaggcttaactttgtgtactatagttctgcctttgtagaaaaataaaaagcttttttttaaaaaaaaatagcatatagctcagattattagctatctctttgtcacaaatgtgcagctgggttcagaatttgcatgtttcccaggcaaaagaattcaataagtaagtaagcgaatcctgccattttattaaatacttacagaaaacaaaagcaaagcaagctttaactcagccggaaccagaacataatccccagagccaataacacatgttaaaattccagcaccagagccaaatttgacaaaggaacactcactatcctactactcctggggcaaactatcctaattttgattctcacactcttgcattttgagatcctccaaatatgactgctcaaagaagaaggaaaggaattaaaatggggagagctaaggtttgagatttaaaatgcactttcaagatacgtgataaatgggaggttcatgaaagttccctttataggtcagatatcatttaacttgtccaagtagttacgcttctattcagacatagggagagagagtgtaaatgaattatctcctccccacagcctttctacagacccttctctcttaattatacacatcccyattgcacaggtcctgccaagcgctggtatccacagggtagatgttgaaaaaagttataattactatcttcagtctgctgctattttacaccctcagactcacggcaaaagcttacagcagaagttggcttagtgtcctaatgcagcagattcaactttttgacaatcttttattctcttcaaaacctcttcctctctatagaatttcatgttcccaaatcttcagtgataatggtagcattctcagggaatgcctggattgatgatcagggaactctttgagctagaaaccaagacaggatttctatttttattcctgtttcaatcctcatgcccagtaaaaataatgagatgtttctttaaatcatttattttatgaagaggagtcaggattatcattctttccacttctgcggcaattgggccaagagaacaaaaatatgcaagggttcagaattcagtcccctgagttctaagggctctgcccctggttatttccatgagcttgggaaagagaattaacctctctgggaaatctggaaaatgaactggtgaaagtagatgatttctacaactactttcaggtctaacattccacaaccttatttgtgccaatgcccccattctactctcagtgcaactgaacttacttgtccctcattgcaatctctaatttcttaagctcgtcctaatttcttagcacacctttctttcttttcctagctttaattttctctctatccgaccagaaactcaggagtaagaaactttgctgacacaaactgctatctttcttttctctttcttagccccatcttcttctaccaaagccatttggcaaggtctccaatctcaagactccctccacatctatactcctatgtctaagtttctaagcatgagttggcaacacctcaaacaacagatcctgctacaaggctagtctgtactgagtttataattgtttcctttcagaagtctcttcaagccaggtatgtaagtttcccatgttgaccctcatagctatttgaaatttttttttctttgctagcagactccctaaaaatatttctttctctcctctttcctcaagctctctgccttctctctctgcagataactttatttttcataaagtgattataataaaaccattttcacaatgaaaatgtgtagaatttaaaatacagaagttcatttttagtttaattacattaacataaaaaatgatcacaaatctcctacaaaaatcatggagcatttttgcatttctatatcacttccaactcagcttcattttgatttataagcttgactacacatctagctgtcaaaccagatgttgtatggaaaataccagctaagtctgattgaatttttcaatttgcctcatttgaaaccctacagcaaaacagaagtagttaagaacttcaaaaagttttagagtagagaactaattactaattacaatgatcttttctcagataatatgtagcatgaaaatacaagttaattattcacaaatgactacaagagaaaagagagaaaaacagaagacatttgttaattgaatcaaatattgtgaacatattccatctttgacattctgaaagatattggaaggttcatttaaatttgcaagcatctcttcatagcataatattccaaattaaaattttaagggggaaatacagaacagaacagaatggcataggatctatggtggatagcaactttagttttaattccactttgtgactgcccttagaaaaggggggatggtagggttaggaatagtgacagtgttgataaagcataggagaaggaaaggmtctgtagaaatcttgagagtgaccctaaaatgggaatggttcttaagtttttttgctaaggactactagttaatcacaagggatcctttctgagaacaatgtttttaaatgcataaataaaaatataggactataaataacttcaattaacttgacatagttatcacaatattaaaaacacaaattagtgatacagtaatagatatgctaattcataaaatgttcaatagcaaggtcttctagcaagtctagaaactgccatcatttcaaaaaaagttacgaacataaacattatctttaaagctagctataatacctgtagtctattatgacaatattggtgatttctattgttttgtatagtctctgatctccagttcatctcattctctctcttactcactccaaaattttgctccacaattctaccaaaactgctcyccttaaggccatcaataaactccacattgctcagtctaaagtcagttctccatcctcctcttacttgaactgtcagcactatttgacacagttgatcacattctccttcttaacctaccatcttcattacattcaagcatgccactcactggtgattttcttccaacctcactgggactctcttgwgaagttctcttttccatttcatcttaccaacctcttaatgttggggtgtcccaggttagcccttggaccttctcttttgtgtgtaaatttactcctttagtgatttcatcaatactactgatatagacaaatcaagatgactccagatttatatccatagccttgatctctcccctgaattctagatttgtatatcctattatctatacaatatttgcatatattaagtttgaaatgtctattactccttgaggacatttcaaaggcttaatagacatttcaaacttaatacatgcaaagtgactatcctgatcttcacctccactccctccccactaaacctattcctcctctaatattctccagtccagttaatggcatatggaggccaaatgtttgaagtcattcttgatgtttttccttctctctcaaagccacttccaactcatcactaaattctatgattagaagactccacgctgtaaatgtaacttaagtctctcattttactaaccatattgccactactctggtttaagccaccgttattcctgtcttggtttattgaagtaaggcttccaccttcacctcatctcaaaatgtgggctagagtgatcatttaaaacataactcatagcagtcactttcctgttcaaaaccctctagtgacatcccccatttcctcatcatgaaaggcaaagtaattacaatgcctcaaggcctaacagaatttcatacaatatacattttctcactgaccttatcacccactagcctctctttggcttattacaggaagagaacttcctcatggtctccgtacttacamctccttctgcctataatactcttgccccaaatgtctgcctcctcaactcctctaagtttttttttgttttgttttttgtttttgtttttgttttttttttgagacagagtctcactctgtcgctaggctggagtgcagtggtgtgatctctgctcactgcaatctccatctcccgggttcaagcgattctcctgcctcagcctactgagtagctgggattacaggcacgtgccaccacacccagataattttttttctatttttagtagagatgggatttcaccatgttggccaggatgttctcgatctcctgatctcgtgatctgcctgccccagcctcccaaagtgctgggattacaggcgtgagccaccgtgcctggcccacctcctctaagtctttattcaaatgtcccttcaataaggccttcatgataccccctacttaaaatggcttttagaattgtttctccttattttactgttctccaaagcaattatcrccatataatatagtacttattttattcatttgtttatctgtcttgcccaacaatgcaccccataaaggctgagatttttgcctggtatgttcacagatctctccccagtgcctggcataaggcaagaattcaataagtagttgttgactgaatgaatgaatgaaggggttctttggaatcttatcttccaggaagtctagcacatttatccattgcagtaagactcacacatacttctacttgccaaaactatatcatactctgtaaattaaccaaaattattttaaatgtgatgcttgaaataaaacaaagctagtacttacagtatttgctatagaaatactgtaaaaactaactagtggctcacaaccacatgggacagtgcatccacaaggagatgcttcattatgccatggaagagcaagcactttgacacaaacagacttttagctttgaactccacctctgcaacttgtgagctgtgtagcactgggaaattatttacctctataagcctcagttatttgcttgtagtatggaaaatgtgattatatgattaatgcatcttaaatgaaattatatgcacaaagttcctgggcacttgaaaaagatgatcctttcatcattcctcttgacaacgattactttccaagtagatgtgagcaaataatagtgtacttaaaaatggtcaaatataagaacaggattggaaagactgtgatcagatgaactgatcacctgcagtggtagtttgggtagagaggtttactgggttcaccctaaccctgacagttcccacaaaaatgatatttagatcccttttcagggtaaggtatagagggcatgtcgaaaacaggttccaaaatagaaggagaccaagactctattcatgagaaagagcagggtgagacattatcatctgaaatggaaggtgacaaagccaagcagaatttgggctagaaagtggtgttgccccattctcaaggatttgttgttttatcagtgcatagacatcaattttttttttttttttaagatggagtcttgctctgttgccaggctggagtgcagtggcgcaatctcggttcactgmaacctccaactccctggttcaagcaagcaattctcctgtctcagcctcccgagtggctgggtttacaggcatgcaccaccatgcccagctaattttcgtatttttttttcagtagtgatgggttttcaccatgttggccaggatggtctcgatcttctgacctcgtgatctgcctgcctcagcctcccaaagtgctgggattacaggtgtgagccaccgcacccagccagacatcaatttctgtccacagtaacatcgtaggaaaaactttgtcacactgctttgggattcagcacaacattcttctctttccttagacatttaaagtatgaggattctacattgaagagcaggtcttttttttttttttccgcatttcaatctagatgtttacattggtgggggagatacacttagaagcagtgtgctttttcataaatcactctaccttgtttctctcatactttaaaattacatacatttttaaactggcacaaaagtactgtcttgggagaaggcaagaaaatagataaaatgttcatcagatgataacaattgyaaatattcataaattagggaccaggattcctatttcctaaggaatgtgctcagcctgggagaaacctcactttagaccagtggggctcttgggmactttcatcatgacatttaaacaataaatgtatctgtcaggtgatggtggattcacttcggaggaactgacacctttgatgaccatcacaggactgagtcaccaattatacctacagcctgcacttggttttcttctcttacagaatttcatgatccctccctaaaactgataaggcagcatggaagtaggagggaaaagggaggagataaagcagatgagaggcagactgcaaacccatccagctttgcaaggactgagcttcatcgctcacagaaaagtcaagttcaagtcacaactcaaaattaaaccctgactaatgtaaaaaacctgtgtttagaaacattttacacaaaagttacattttggaataatagaaaatttaaagctattaaaaagcaataaaataagatgaattctgcaataagattgccacgttccactcttgaattaaagcaaacaagcaaatatttccttcctaaaacttcctgcctttattctgctggcttccactctgtgagggccaactgtgggtcaagccctgttctttgtcccatgccaaaaagacagctgggagccacggtggaaggcagacaatgccctggatttaggtactagtctcctccaggttgtgtttaaaaagctgggtttttttggggtttttttgtttgtttgttttttggctcggcatggtggctcatgcctgtaatctcaacactttgggaggctaaggcaggtggatcatgaggtcaagagatccagacgatcttggccaacatggtgaaaccctgtctctactaaaaatacaaaaattasccgggtgtggtggcaggtgcctatagtcccagctactcaggaggctgaggcaggggaatcgcttgaactggggaggcagaggttgcagtgagccgagatcgcaccactgcactccagcctggcgacagagcaagactccgtctcaaaaaagaaagaaaagaaaaaaaaaaaagctgtttttttttttttgtaattaaaccaaactaaatatttcccaggagggcaagacagttcccaaaatgtctaacgaacttccacgtagagaaaacggttactgattgtcccaaagcaaaactgtagcaaagcctttccctgaatttttctctcttccttccatcttcttttatttctttgctcagtcaaaggccgcatatgtttcaaaggatacttgatataggagggtagaacagtactttcagcatgcagattttttttctatgttaagtgaaaataatgatttcatgaaatgtgccttcccatcattataaaacaattttgagagaaatccatcctccttggcaattccaaagcctgttgtttgctttgcaagcactatataagtctggagaggggcctgaaattaatatagctcagtaccataaaggcagtgtatagaactgtagtcaggacttaagatttgagtcttttgcttccttcactttgacatattacttgagaggcctgtacctcagtttcctaatttgtaaaattgggataacaatagttattattttatagtgccattttgaaaaatagtgaagcttctgacagaagacctcaataaatgttacatattttaaccatcagcattaataaacgaaaacaattttccctatttttggtcagaatttaggaaaaataagttccttttaaattatgtgtagacaattaaattaatcttttaagtaaaaaagtcttattctcatttttgatgtacagaattttagcatcatctaactaatcctaaaagactttgtataatgaaatgaaaaattaatttatttgatgtcattactttttaaaataaccaaatgtcatatatttatcattttaaagaattaatatgcagctgggttaactcggctatgtaatatatttttttttcaggatatacctttcagattattcaaagaaatagctaaaaatgagctatcagattcaaagaagctttttaacatagccaactgtaggtcagttttagtgttaaaaatttaatagatcatacacctaatttacggcgagggggaagcagtggctacatttaaccaaaataagatgttcttctacaaacattaacataagaataaaaaccacaagttttggggtgatcactgataggcaaaccatatttagaacttagcagggttctaaatctgtaagaagaaaataaatatggaaaaaaacaacatgaatcagtgtgctctcacatctccatatctctgtgttacccaacatagaactatagcttatttaagacatgtttagtagcttttcccatactttcctgaattcattccctgtttcaaattcaactaaatgggagaattagaagagaaattttttgtatttggatatcatggcctatcttacatttgatatatgctattgcaattttcttaaaatataagttcatagcgcaaaaagaaatattaagtataacatagaacctggtaccactataagcaggtgattattaacactccattaggaacgttgatggttctgctaatgaaacaatggttatagcaaaaaatagactatttttctggaaacgtgagatttttcttatgtgtacaagcacatacacgcatacattagccttgacataaaccatgaccttctatttgttaacaattaaaacattgtcttatataagcccaggtcatctgctagtggatagatatagatataggtatagatagatatagatatggatatagacatatatatatatagatagatagatagatatatgtagatatacatatatctacatatgtgtatatacatatatacacacatgcatatatatatacacatagcatgcatatgaattacaattaattaatcaataatggtcccatctggttaactgcattggaaaatgacatctttccctcagcaatacaagatttcaaccactacttgcatctgcaccctctatacctttaagcagtatgcaaatgatacaaccatatgaggcgggactatgtaaaacagtccattaaaataattttcccagatcaaataaaaactgacacattttctaacatttattaagaatttttaaaaatgaacgttctaaaaatgaagtcttaagaaaattctgaggtgtgaaacataaagataagagtgccagtgagaaaaataatctgtttagtagatttaaattatcattatatttcaccaaatcctgttaagaaagaatataycccctcgaaaggttcaattctacaacaatgagtagttaataggttcttagaagggaggaagtcattgtactactgaatagyaataaaatctatgattcagtgtgtttcaaacatttaggaatgctttttgatgaatgggttttttaacagctactgaattggatttgtcctctttatataaaagtctaagtctatactaaaagaaaagaaatttatactctgagcatgaagttaccacttggaagtagttctttgccccatgactgctgagcctgaaaaacccaatctgtttctagaaaaaacttgccaacaaaatccacagaatttattagatagaattactcaagagcaaaataccatctctaccatcatcaaataagagtatgttgctggctgtggattttggtatagttttaatttttaaaaacagtttccaaaacaataccaagaggcagtttgattctacagtatggcaagtaaggaatatcagacactattttagagtatatatctaaataaatattatatatatatataaaacacatcgaaaaaagatatacatacatattagtttgacattaagggaaagaaattaaaaaaaagagacaagatgaatttaaactagagaaaatacaattttagaaccacatttaggaaagacaaaatgaagaaactggatatgaagaaagttcatatctaaaaaaacgtggttagaagcgattggattcaggagtttctgcaaacaaaaaggttgtctcctcagtgcctaaaacagcacctaacagagaaaagacactcaatacatattcattaaaagaagaataaataagtggctatgaaactgggtatacagcaccatattgagtcttaaagttacatttttaataggttaaatttaaatacatatttttggccgggcatggtggctcacacctgtaatcccagcactttgggaggccaaggtgggcagattacttgaggtcaggagtttaagacgagcctggccaacatggtgaaaccctgtctctaccaaaamtacaaaaattagctgggtgtggtggcatgtgcctgtaatcctagctgctgggggcgctgaggcaggagaattgcttgaacccaggaagcggaggttccagtgagctgagaacacaccactgcactccagcctgggcaacagaatgagactccatctcaaaataaataaataaataaacwaatattatatgtaaatatatatatttactttatgagctatttcttttaaaataacatccattgctttattttctgactgcaaaagcaaatatactcattgcagaatatttttaaaaatcaaatattaataagaaaatgtaacataatattaatagacagataaaaccaccagcaaacattcatacatctatgcacaggcatttatatttacaaatgtgaaatgatactgtatatcaattttatgtcttatttttataacttatcattacattgtgaacatttccatgtcattaaaacttcttcaaaatcatgagttttaatggcctcatatcgttccataaaatgaatgtgcaataattgaattattatgctattgatgcacatttgaataatgtataatatcaaaaagttggggagaaaattttaagcagctttatccataaaactttaattgtatcttggattatttcctcgggatacatttttatatgccaaattgctgcatcaaaaggacagatttagcatttttgatccataacaccacactgttttcatgataatttgtattataactgctcccagtagttatgaaaatttttattccatgatacttcaaactagaaattttaagatctcttttacaatttgataggtcaaagctgatatacttcaaacttgattgctggtgagattgaattttttgtttgtttattaactatttgtayttcttttgtgtgagctgcctcacatttgaggagaaaagctgcctctcacaacattcataaggcttcctgaccctagagaccctctatatttccacaacatggagagtatctgtaactcctatcagaaacatcttagtgaaacagcatgaaagtttatgaacctcaggattactacatgaacatgagagtaacagtactgacctacctcagagatttctcccacatcattattacaaagtactataaggctagaattgacttggagtcaaggcgagttccataggtttaatgcgtggcacctatctcaacaactgcaaaatcactgtaacttgtaaaaaatcccagggccactcatggacagccacatctttaaacccacacaaaaatacagacactttgattacatgaaagttagaagctctaaactagagcaaggtcagttgtggtaagaaggtattagattcaagcatccacaaaagtttatagtctgtcagtcataaggatggctattgggatttctttacagttactctgttgtattttcactttggttttacagcactatctcttaggaagtcatccatatattacctgcatacacagtcagcttcttctcgatatacagcagatatgtaacaattattctttccttcccagacagtcatggtaatattacatttgagttcagtgaggtaactggtagccagaaatactccacaaaaggtctatattcttgggtgggggggggatacaattcttctattagggaaatttttatcacctacttatttttacataaattctaataatgccaagaaaatacatttcaaagaggaaggtatagaaatttagagatgactgtgacctcaaatatccatgaaatataaccagaaaatctgcatctacataatgacactattttcacatagccccaaaatgatatcttagaaagccaaaaatctttccttatctccaggcagaactatttcaaaagataacaaatgattgcccaagtgatatttgaattataccaaaaaagagacagtatatacatggtaacaccatcctctgtgtattatttcctcttggtagtccttctgtttttcaagataatacagatctcaagaattctcaatgttcaagcaagaaaattccctcaaccaagtgaaatagaaagaagttatctattaattgtgccaggatttcagttgttttctttcctttcttcttttcatgcaagtttatttgcctttctatgagtatttgcattatttgctctttttcccctttgaatcatcttaaaggaaaaaaaatgaaaatgtatctatttggactttaattacactgggcagcaatgaggcaggatagtgaagttaaaaaaaggctgggtgtggtggctcacgcctgtaatcccagcactttgggagaccgaggcaggcagatcacaaggtcaggagttcaagaccagcctgaccaacatagtgaaaccccgtctctactaaaaatacaaaaattagctgggcatggttgtgtgagcctgtaattccagctactcaggaggctgaggcagaagaatcgcttgaacccgggaggcggaggttgcagtgagccgagatcgtgccactgcactctaagcctgggcaacagagagagactccgtctcaaaaaaaaaatacatacatacatacataaacagtgttagaataagcataagactgtgcttaaatcccaattgtactctttataatttgtatggctttgtgccagttttcatcttctttaagcctataaaaccaggagtgtaattcactcctttactatgaggattactttatgtaatgcacctagtagagtgcccacttagagtaaacactcaataaatgacaaatgtcatcattataactgtgttggtaagaacaggtaagggtataaaccactcccacctcactgaatttgcaggcaattcctggcaatagtgcccaacaaagagaaaatataccataaacataatttattttaattacaagagaccctgtcatctctactattattataaattaacaataggttcttctctttaatatttctcatttctgagccaaaatcattttttttcaacaaggtcagagcatattcttttttttttaaacatgctaatgtacttcagtatattccattctgtaatatttgtttcaggaaatgaaaattaaattttctttaattaacccccatgactcttgaaaattttcctcattgtccttgaatctatggtctttaacagtctttataatatcttgaactctacactccactgagcttttaagctttgtttagtgttgccatagcacacctactccttatgatagaatatcgccttctcaaattaacaacatatagtcaatttattgtggttttccagtttcactggaatgaacaaagatttctttctctcacaggctaaagttttctccctccttcattattcggcttcagagttcaactcctttacccacatgacataatcagctcaaaatttattatactatatatagcatcaaagaatacatttttttagagatgaaatgaggtctatgttgcccaggcttgcctcaaactamtgggctcaagcagtcctcctgcctcagcctcctgagtagctggacctaaggcacgcaccactgtgccttgcagaatacattttattaacgtaaaaatcattattttcctcttacttctgcataaatggtatttttggtccatttgctctcggagaatagttaactttgtcattaacaggcccatccagattgttttattacttcagttgataaaaatttatttcataaagtgctttttctaagtaagacatgaacataagcaaacccataatattaaaagctttatatagatacaatttaaaggttctgtcaaatagattttttttttttttttttttttttttatgaaatggagtctggctctgtcacccaggctggagtgcaatggtgcaatctcggctcactgcaacctccacctcctgggttcaagtgattcttgtgcctcagccttctgagtagctggaattacaggcgcctgccaccacgcctggctaattgtctgtatttttagtagagatggggtttcaccatgttgacaagtttcatarattaaaaagtaggataaataaatacagtagagagaaataacatttcagaaatgtcagtattaaaaactaagtcaaccacaagcagttttacatcatgtttacaaaatatgctataatagtaatacacttgaggagggttaaaaatggttctytttttattgcttctcagccttttggctaagatcaaatgaacagttctttttctaattgttcaaattgatttcatagtcttgtaatctacatatttatgaaaaataattttaaatctcttataaatatcaaaaatgtcagtttccaattgaaataaaacagtattgagtaaagactataatgtatgagttttgaaaaagaaaattgacaattagaagaaaatttcataatattcattgtactaggactttccacatttttgatatgacgctaacatcaatattacaatgaattctcaataatttgtattaacaaatgacaagaacaatctgaactaaattgaacaataaagtatctgtaagcttagaagcattaatttcatagtaactaaacttttggtaaccaagcaattctatatagaagacttttaagtatgcccttctaagtttgttttagtaacattctcatttataattagcaatatataatttattttttaaagtgctaaattaaatacactctcaaataattttgttagactattaaattacttattttgtttcaagacggagtctcactgtcaccccagctggagtacagtggtgcgatctcggctcactgcaacctccatctcccaggttcmagtgattctcctgcttcagccttcccagtagctgggattacaggcacccaccaccatgcccagctaattttttgtatttttactgagatggggtttcaccatgttggccaggctggtcttgaactcctgacctcaagatttatccccctcggcctcccaaagtgctgggattacaggcgtgaaccaccgcgtccagccttatttatttttaatcaactttattgaaatataattttcataaaacaaaatgcataaagtatacggtttaataggttttaccaactgtatacaccagtgtaaccaccacacaaatcaagatataagaaaatttctatcaccaaaaaagttgccctgagtctctctgtagtcagtcttcttatgccctaccagatagccactgatctgtctctatcaccacagattaattttgcctaatttcgagcttgatacgaatgaaatcattcaatgtaggtttttgtttcttgctttcttttgctcattacaagtttaggcctacttctgattcacagcttctggtgacataggctggagaataagttattccttaagaagaaaggagtaatctaaaaaagtgcttcttagcagttcattcattttaattgctgagtaatactcccctgtgtattcctatacagcacactttacgcattcacctgttggtgttgatggacatttaggttgcctccagtttttgactattgtgaattaagctgctgtaaacatttatatacaagtcattcgccagcatatgtttttatttctcctgggtaaatatttagaattgtaattactggttcgtagtgtaagtgaatgcttacctttttaaagaatcttctaaactgttcttcaaagtggttattccatttcacattcccatcagtaatgtataagagtttcattggttcatatcatctactaatacaacacttaatatgtgactttttgtttttgttttgtcattttaatgagcaggaagttatattctcattgtggttttatttttaatttccctaatgactaatgacattgcacatcttttcatgtgcttaccaaccatttgtttttttttttctgaagtgtctgttgaagactttcatctatatttagttgagttgttttttcttcatattgaattctaagcattcttaataatacattttttttaaggagaaaaaagtattccagtccaggtcagcacaagctctgagtcaagaataggtctaaaatccacagatgcaattctgaaacaataggcctggaatcaaaggtagctcttgatgaagaggagatgagtaatctggtattttagactccattaagactcgccattttgtagctgaccaaaagggtcattctttagtcccatttaaaatcggcatttcatcatttcaaaaakcctgcttcaatctaagcaaattatcatgtgattctgcaattgatagctagctcaataactgatttatttgataagagggaacacttagaaaatatacagctctcatattttctaataaaggtattcacatataattaatagtaataagtactatctgtgagtagtatgcacaacatgcatgctgctgtcttttgcaaagtattaaagcagatgcctaagcattgtaggtaaggatgtacttgacttagttatgatttgattaaatgttccctgttcagattggcttctgaatcatcagctactggtgtaagtaaaaataagttggaaaggtttccctttcctgaggatttcaggaaaagcttcgcaactatttggctggatattgcaaatcagatcaagaattgggaagcggtctgtctttgacttatcttgcactatccaattctatgagtctatgattgtcatgtacagagcacttggcttagtggtttgtgtataacttttcaggattagtggtggcattgagctggttcatccacaagtttatctggttctccatcaagctaagttcgtcctatctgcagagcagacacagtatttctgctctttattcttggctgtttcctctatttagcactcctttctgtctgtttttctaagttaacacatgatattttggtattttaaactccattaagacttgtcattttctatctgaccaaaaatcttggtcttcttcaatcagtatatcaatacctccttataggaaaatatataaaagtcatttattctaaagcataaattatagaccaataactgcttaacatgctactgcagttaaaaaccagagttgattcttttctaccaactgccctctttaatttccctgtataaaaggcccaataataggtcagttagtccacaaaattttgttgaatacttactgttaggtgctagtagatttgtattaatgaaacaaacattgttcctgcctttgtaaaacatatgttcttgtgagaaggactttaaaaataatttaaagtaactcatgaaataattataagtatttctaatagtgcaggtgagaaacagtgttggagaacatagaaatggaatggcagcactaatatagggaatcagggacgatacccctgtaaaagggatatttcagctgagacctgaaattaaggaactggtaaggcagaaaaagtagagaagaacatttcagacaaagaaaaacatgtcaaacatcctctcgactctggaacccacatgacctttccatttttctcaccaccacttctattcttgccttcatctctttttctatagattactccaatagcctcattactagcctaccctacaaagtgttgaaagatgtcttcatataatataactgtaatgacatcatctcttcctaaaaatctacagtgacttccctaaagaaaaatggtcatattcccaagtttggcatttttggcccttttcaatactaatcaaacttacttttccaatcttattttcatgacttttctgccacactgatctatttactttcttcgtcaatacaattttattctctgaacttagtgctgttttctcattattcatttcatctagagtaagtctttaaatttcaygtaaatgattattttattggtaaaatgtataacaagtcacaggcctcttaggagatacccacgtttttgtttttgctcttgtttttgtctaaagacagtgattgctttccaaataactactttgatgtgcttatcatttggttactgaaatgaaccaaaatttaaatttctagtatgggcgagtttattgggcctttcaggtgaaaatcaatgtaattttatatctacaaatgcttccaggagaattagccaatggttgatagttccattgtctaaaataatgacctaatataaatcaatgggaaaatagattaaggcttgaaatggcaagatttgtttaaaggacctataatgggtagaatatataaaggttggccgggcacggtggcttacacctgtaatcctagcactttgggaggccgaggcaggtggatcacgaagtcaagagattgagaccatactggccaacatggtgaaaccccgtctctactaaaaacaaaaaattagctgggtgtggtggctggtacctgtagtcccagctactcaggaggctgaggcaggaggattgyttgaacctgggaagcagaggttgcagtgagccaagatcacgccactgcactccagcctggcgatagagtgaaactctgtctcaaaaaaaaaaaaaatgtataaagatcatatgatatgaccctcagcctaagcttagcaataaaactttagaaactacaagagtggcctctgttaagagctcacagaaggaacaattttctatgcttcactgtcacgtgtaaaatagaaagccagaggtacttcagcattcctatctaaagagcttccaaatgtgctctaaatttgtagatgtaagctgggccttgtatgttttaaaggttaaataaatcttcagatagctatctactattgttagataaaggagtcaactttttgccatagcaaagtaaaggaaacaggattctcttttctgagttgggtggatagtttttgtccataattctgtacttccaattgtcactaaagatatgtcatgctttatagcctcctatatgtctggatcacttgtgctttcatttggaaacaatacaaaatagtttataaatgtaagtatccttgtttaatacttatggaaccaaaacatattttaggaaaaatgacacttagtcaaacttttattcctaagtgtggaataatcaaggttgtatatagaaatccatactttagtataacatcatgagtgaaataaatttgcacacacyytatatatatacacacacacacacacacacacacatgcgatgacgttcctgaaaatatgatcctagataattaagagaatggggagttgctattcaataggyataaaatttcagttatgcaagatgaataagttctagagatctgctgcacaacatagtgcctagagttaacaatattgtattgtgggccaagtgcactggctcacacctgtaatcccagcattttgggaggccaaggcaggtggattacttgaggtcaggagttcgagaccagcctggccaacatggcaaaaccctgtctctactaaaaatacaaaaaactagctgggcgtggtggtgggcgcctgtaatcccagctattcaggaggctgaggcaggagaatcactttaacctgggaggcggaggttgcagtgagtctagatcacaccactgcactccagcctggatgatagagtgagactccatctcaaaaaaaaaaaaaaaaaaaaaaaaaaatatatatatatatatatagtatggtgtacttaatatttttaagggagtagatcttatgttaagtgttcttaccacagtttttaaaaagagagaaaaaaacagagctgaaagaaactataaatagcaaataaaaattagcaattcataaagttccagtgaataaatacatttactaaacctgtcacattattttataaaggatttttatttaattaaataaaaagtagcatgaaagcaaggcctgacatatgcaacaaatgtggtcctaaattattgcttagcctgaattattattaactgtattttatgtaaatttcacaaagcctattatttgaaggaagccattactaaatcttgactagcgacaagtcccttgttaaatagccactcctcacatacttatttccttttttttttttttttttttttttgagacagtcttgctctgccacccaggctggagtgcaatggtgcaatcttggcttgctgcaacctctacctcctgggctcaagagattctcctgcctcagcctcctgagtagctgggattacaggcacccaccaccacacctggctaatttaatttttgtttttagtagagacagtgtttcaccatgttggccaggctggtctcagactcctgacctctagcgatctgcctgcctcggcctcccaaagtgctgggattacaggcatgagccaccatgcctggtcataactatttcttaagtaggacttttagaattggttcatcctaaagtgagataagcatacatgtatttgtgaaaatagtattcaattgagttttaatttgctcacagtattagaacacacctatggaagttttcctcatttttatgtatatttatattaaaagaaagaatgaaaaatttagtaatgtaagagtttctggcataaaattctgtatcacagaagctggaaaatttcggcccagggtgcagactcaggcactaacttgggggctttgataatgactctgccatacttctggccatgcgacctggaagaatttgttaaccattctatccctcaattgccacatcagtaaaatggggagyataaacagaacttagaacatagatgtttgtggggatgaataggattatataggtgagatacagagtactgttgtgcacacattgagtgcccaataaatgttagctataatctactttatcactatcataatagaactacagctttttcaaaatttcccaaaattttattctatggagaaaaggtcctttgaaagaactgacatttcctggatttgaaacactagactgaaaaacaaagtaaaacaaaatagaaaaagcctgtttttgtattttgttgtgttctgctttgctttactttcctcaagtaccgttggaacaccagggggttccatcaagtttttattcttttgtgttcaaaagaagaggaaggaaaacaaggttatgcattggcactggagacacttttttccctaaaatgtttagaggcctagaatgtacctaataacttgtaaagcaccaactgtatttcctggttactaatcaaatttgtttctatttcatttctgagccaggaaggcagacacaagttataggtaaatgtcaggtgctttaactgacctasggcagtcaataaccagtctttcctcccctgatgaagtcaattactaatttagagaccactgtgttccttgtctcttctcctaagccaagtataccacaagtcaacaaagataattctttcagcagccaaacactagggcgaggaaatgcttactgtctgcttgctctgttagcagcaaactatatagggaagccatcttctggctcacacagagaaaagagaaccctggcactgccacagctgtcactggccttttctgtttcccaagcaaaaatcagaattgaacaggaaccaaaactattgagaccttccttctgtttcccaagcaaaaatcagaattgaayrggaaccraaactattgagaccttcctacccacctgtgattaaatgagccaaatgagtagcaacgtggcagatggccctacagttaatgagattcttgcaagcccgcaattctgttgaaataaaattttgtcacttcagttttcagtacaaaattgtgccaactgaaccctccaacacttttctccaaaatgggaatcgtcaatctcacaagggtccattgtcagaggacaaccttcatgtacaagagtgttcaagataatcttgaattttgtaatggtctggaattgctatgactccctgtacaccagaactttcttctcacacattgatcacttcaagcatccacagtttttctttttctttcytttttatttatttatttttgagacagagtttcactcttgttgcccaggctggagtgcgatggtgtgatttcggctcaccccaacctccacctcccgggttcaagtgattctcttgcctcagcctccctagtagctggattacaggcatgctccaccatgcctggctaattttgtatttttactagagagggatttctccatgttggtcaggctggtctcgaactcctaacctcatgtgatccacctaccttggcctcccaaagtgctgggattacaggcgtgagccaccgcgcccagccacatccagtttttctagtagtttattcctaaatcaatatcctgactacagtyaagcatcctaaaaatgaatgattacatttatagctgttttctttacaccttcatctatatctctaaatattgttctgattagacctcctgctttaaaacttcatcagctcactcaggcataagtcaccctgcattctgcactcttctggattttgagtccctttgaattgccactgaccatatgacttacccatccccatttccatttccatttattttttttggcacttcaacctcagtatctttctcctcctcctcatttacagcatatctccattgcacttctggccaacttccatagcacattttcttccttctgtagctaaatctaaatctgcagctgttttaatatggcatctgtggttaatttttagtacaatattgcacatattgaatggcagtaatgcccaatgctactgcaatattatgcaagacatcaaatggatggaacctattaactcattgcaaactcatgcattatgaacatggcatagcacttacctgaaacatacagtacctgtatggagaaactacaggttccttcaacgacttaagaagtgaggacatcgagcacattgcatcatcttcctgctgctgcagtgttctataattttcccacttacttgctcccaaagttgcatcaaaagaacaaagagaaaatgaaatccacaggaagctcccaaaggctgcctatttggctcagctgtctgtcgatttttctaggttatgagattgctcttggtgacttttgacaatatgagaacacttccctcacctttaatgatgargcaaggggctccatacacataacattagatagaygagaattccacgaaaaaggataagccatccaatatgctagcatagaccaagatcttaaaataaatacatttgcattctggcagtttgaacagcagagttatttggaagaatggcactaaagagaatgagcccctttaagggcagccaagagctagattttgctagttaagcatttaatgtaaaacagaggccaaytggaataatcattttgtactggaaaaaagaaacacaggctttggagtcaaacagaattagtttcaaataccagccttgcccctcagtagtggggtgactcaggcaagttactaacttctctaaatctcagttttttcacctctaaccaaggataatgcattccttacacacttcttgagaagataatttgatgtaaagcacccaggacaatgtttggtgtatagcagttacttcaatttttgaaaggtggcatacaaacataattatagcaggctttggcaggaagaggtataaaatattatcttaagaataaaacagtaggtactgaaattagacaaagacaattgaaatagaaaaaaattgttmaccttgtgaggttatataaaatagaataaaagagatcaatgaatagataaggtcagatggcaaaagataagctaagtaataagacaaggaagaataaaaggtgagagaaaagaaaagtagcaaatagattaaaatgtcaaaatacaggtatgaatggagtcttgcctttccagtaagatattatgagaacattagggaccctaagagagaagctgaagtccttcagctgacctggtaggaaraaggggagaagcataagaccccagggacacaatgcaagctacatcttaagcagactgtctgcagagggcttgagccttccagctctgaaggcgccctcggctcaggcagcactaaaggaaatgcactaatgagcagaagggcaggttgctgagagcagcgactgccgaacttcctggtcaagcaggggttttttgatttcataaatcaattacaatgtgctatattgatttcacaaagtcagcaggacttaaaaactaatgagcaaatttttttattattatttttgaaaacactgcagtgtctacagctcagcacactcggcagaaagacaaatggaggctttggctgccacagatttcattccatcctagccccctcccagccatgttcctcatctcagcatcagcaaagaatcaggagctggcataagaccctggtgcattatgccaacaaatctctccctggtatctgaagcaggggcagccccaactaatgtgtctgtgtttaggcactagtgagttttgtacgggtgcccaggcatccccagatggagcaaacaaggaaaagaacaagaaacccacctaaccaaggatataaaatacagaaggactgcatttgtgattgtggttcttaataggtagccactgccattttcttcccaaccatggtaacatctaaactgsagtttttattgagctatttattttgtacaacatcaaacataacaaaattgataaggagattattctgccactcaacccctggcccaatgccaacagcttcagaaatgacctcaggtggagggaggcatagatagtttagtctttctccacagcaaaataaattatcccatgatacagtttttaggaaaaaatgcaaagtgggggataaatacattctgctaaaattttgctgttaaaatgtactacctgttaaaaatgtaccattctagggttgaaaaataattaatgttaaaaataatagctaatgttttagcacttgctaggtgataggctctatgctamgtcctttgcatgcactatgtcatttaattcttagaacaacggtaaatggtagatactattattatctcaattttatagttgatgataatcgaggcttaggtaggctaaatatctcctgagtgccatgtggtaagtgacattatgaagtctcatctgtttacactagagcctgtgttcattccatcagtaaatagttattgagcacctaacacatgccaggtactattctaggagtcatccgctaccaaaaaaaacactttttaagtcaagacaatgtatttaccagaaatgaaaatatttcaacgaatgatgacgttctttcagaatatgatttcatttattgtcaggattgagaaccagaaatccagaagatagttgataaactggctaaagggaaactaagagaataccaaacattattcttagtatgtgaatacaacaaattagagtgatgggggaacaagaaggaaggttaaaagtctaagaagttaattttttcttgcatagaggaagcagataaaattgaccaaatgtaaatatgagagaaagagtaattactagaagtaacactaaggaaataaaatctgtgtttcttaggaagtcattttgtctcacaaacacaacaaagccatgaggatagattaaaaaataaactgctacataaacttgatcttcaaaatacttctcaatgcgttcatgattccttttaatattattagrgtaaatagtaaatatagcctgcagaagttttaccctcttaattttcattcctttatgctttttttcttgtatgtacttgatgactaaagtcacacttaaatgacttaagaaaatgtgctacaaagaaaggaaaacgaaaatttaaataatttatttttggtaattttcctttcactttcacaaaactcacaaataaacagaattaggtaaagacatgccccacaaaatactgccttttactgacacacattttttgctctgttttggtgctttttttttgtttaagtacaataagaacattaattcaaggtaggcacctgcctagatcccaccctcatttcctacaatcctctctcttcttcactactgttgagccaaaatatttcagttctacaaacatacagagctcatccctgcctttgtttctttgtctcagatttttccgttgtctagaatgttccttcctagatattttccttatggctgccttctgcaagactaacattatctaatacttcaccacaaaggtatttcctaccacctttatcagtcatgggtgagtaaaaaacaaatcaggtactcatatagtttatttagtaaaggggtgatttatagtaatatagtgattatttattgttataaagtttaacaatatgatagcacatataatgcagaattctgtactacaagagccagggaggagtggttaccaagggtgagagaataaaggaagaaacagttcctacagctcagaacatgaaaatataggggaagggtgcccaacaggaacctggccttaggtaaagaaaaacactgccaatcagtggggagctggcagggaggatccaggggaaagtatacccagccctcctcctcccctagttctcaaatcttctgcagatggttcccattggtcaaacacaaccagaggccagaagtaaggcagaccaacgacagagtccataaagtttggtcttctggagtggaaagcagaatggagaagggcaaagagaccaggaagggcaggtggaaatgatcatcaagaacccaatcccattgcccctagtcacttcctaccacattctttctgtttgtttatttgtttgtttgtttgttttttgagacagagtctcactctatcaccatgctggrgtgcagtaccatgatctcaggtcactgcaatcttcacctcctgggttcaagcgattctcatgcctcagcctcccaagtaactgggattacaggtgctcgccaccacacccagctaatttttgtatttttagtagagacagggtttcaccatgttggccaggatggtctcgatctcctgacctcatgatcctctggccttggcctccaaaagtgctgggattayaggcgtgagccaccatgcctggcctcacattccttcttttaattatttgcattgtacttacaattttgatattttctttttagtttgtgcatctgtttaactaactataaattccagatttgcctgtctggttaatcagtatgtcccagagattaaaccagtgcctgtatactttagatataattacttgccagattaattaaaatagcaagactgctgggcatggtggctcgtacctgtaatcccaaggctttgagaggccgaggcaggcagttcacttgaggccacgagttccagacagcctgggcaacatggtgaaaccccatctctactaaaaatacaaaaattagccaggcatggtggcacatgcctatagtcccagctactctggaggctgagacaggagaatcgcttgaacccagtaggcagaggttgcaataagccaagatttcaccactgcactccagcctcagcgacagagcaagactccatctyrctraactaaactaaaataaaataaagtagcaagacctctgtgattaaaaacaatacattgaaaaaactaatcattcatgaggaaatactctgtagtttataggagaatgatacaaaatgatacctcattttacctgacaagaattttagaatgaatcaactatagtcaactataccttgtaagtcaacttttacaactccatggctatcaggctaatcaggttgatttatcatatctagcaaaacagagatcatactacctatctgcagttaacatggcagttaaataacacatatgatagtcaatcatttctccatcaattaatctattaatttaacagatgtttattgaacacctactatgggattacactagacactgtgaatacagaagtgcaccaaatagccaaaaatcactgtcttcatgaagtttatatttgaataaggagtcaaggtcacatcgtcagaatgggcctcactaataagctgatacatgagccaagatctgaaagaagcaagaagaagaaaccaagcagatatacaagattttctggagagaaagaatagcaagtgcaaaagtcccgacgtgaagtccttttagcattttagaggacagcaagcaggcaaagttgtctagagccacgtgcgtaggttttgaaacacggacacagggcaggactaagggagagggaagcagaatatgttgtaaggacttaactttttctctgaatgaaacrggtggccacaaagtggcacatgacatgacctgattgacattgtaacaggggagcaaggcagaattagagagacagttataagagtatcacattgattcagatgagagatggaagaagtgatcatagtctgtggacttatatttgaaggtagaggtgaaatgatttcttgatgatagaatgtagggctgaagaatcagaaaggagtcaaaaaatgctgaggcttggggtcttagcaatccgagatgcccagaaagactttgttatttgtttgtttaatttattttccagttaactctgaaaaagagaggctcatccagttgttatttacctcattgccatgaaaattcatccagttactactgtctcattcccaagaatcattgaggaaatgtcttgtccttaagctttgtatagttaactttggaacaccatttttccattcaaagacttaccattacactttaaacatagaatataaacataaggtaagatgctggcaaaataaaaattatgaactacttcatttctgtgaatttagctcatgataactaaatttggataaattttgcaaagatggattttgatccagatttaagatttaatcagtggctttacaatttaagttagtttacaatgaattaaaggaactcctttttatgcagagggttttaaaaaatcaggttttcaatttttcaaatgrtcttttaaaaacatttctatcataacaaatgtgggttaccaaattataaggaattagaatataatcatatgctttagtatcaaaactttatttaatataatttagtctttttgtcaataatttattattctttaggatggcagagactgtatagtatcatgaaggaacacaggctttgaagacagaaactaagctcaaatttccaattcctttgtaacttgctggcatcataaacttggatcaggtttcctaatcttcaaactcaagtatcttcattgatttaaaaatgatccccaaaataatactacctcacaggatcattgaggtaggattatattcacaggattatattcaagttttctgtttgtttgaatttagctcatttggaatttactaatttaacagagattatgattttggtagaaattcatcaaagcaacatttaagccaatacaatgattttctagctattacacaaatactcatctaaagttaaagtatacatcttttactgacattccacaaactcagtcattcttactgagtggaaaagctccaacttctgtgtattgtgtgtttttatttggcagtcactttgacaattttattctgaatttaaatctatttttagacctgcatgcattattttatatagtattgtgaagaagctgatatttttgtttgatacactatgttatgtcagtgcttctgattgccaaaaccaacagttcatgtttaaaacctttcagaacattctgcagtctgattaggtcacctctsaatactaggaactaaaatgagaccacagctaagaagaaaggagacaggtgcaatttttttcctacttattctcatttcctaataataatataatcaatagatcattataaacctctttcctgaaactctgccctcctccctgtttctctccaccctacacacacacacttaaatacaccgggttcccctatttgctccactactcactgaaggatcatcttcctcttcatttccttacacatccgggtgcttcctgggctttggtcctcgatgtttcctctcacttaaaaaaaaaaaatcccttttctacctctcttttatcagtctcgttacctctcatagcaagaaaaagtgtttttttatttcctgtatttcctggaaattgtatctgttttactttgatggctcttgtctagcagcaagaaatgaagaatccgacttggagtaaaatctttttgaaggtaatgccaagcccttattcctcttctttctccaattgactgtagcagagggccctcctaggggtcaatatttaactctttaattaatcaactgttattttagaatacagcataaagttctcacatatttaatatatgtcaacttattccctaaaagtccacagaaacaagcattgtggcagaggaaaatttattgaaaaatattgttccaaaatcttgcttcttgattatatttgtaggtataacagaattagactactttaatagctgaattcatttttatttcattgtggaataaaatgagtgctgcagatgccacactatggtttgattgttatatatgtttggtcatgtgggattagcctgatacatgtatgaactcaaatatccatgttagctaacaaacaaaaggagtgggtaaagagatgtgtatatatatacatactgaaagaactttttctatatatgagtgaatagcttacctaacgtaacagtctttayataataagactacttatttaaattttaaaagaatttacctctagatgggtttttgagtgaatttcctcagaaaattcattttcatggcacagaggattatcatacttggctgctggtctgagctcatccaggaaacagacttgagtgcttttattatccactagagtagatctcaaagaacagaagttactctatgattatttagcggcaataggacttaccacagttcctggcatttagtgttcaagaaatatttgttgaacttcattaaaaaattaagatagccacctcaatatcttagtttatacacacattttcaggcacatatatattatacgaagagaaatgcaataataatccttgcataaaacagatgagaagctcatctcactatgagatgggttggagaagtcttcattttctttaagagtttatactcaagcttgtcagtagacawcattaagctgttatgagattccttctcttgctcagttgaatctgcttcatgaaccaagtcaggttctcttccatggcaaaagtaatgaggtggggccaatgtgtcccattgtctcccaatatccacagcagccactcaacactgtagtgctgtggccaggtgaarggactctgaaactgtagtactatcctttgaagctaccacagttcttctcctctatgctgaattaaccacatccttgtttccatttaaataagaaagatgcacagaggttcaacccacccattattgaacatattttgcatatggaatttctaatcaccatattattccagggatgtttgcagacggaacctatttagatttttttgtacatggatgcctagagaattatggaaaaaactagaaatcatctagttctagtctaatacccacatttagcattcaaggtaactgagaaataaagaggtcaaatgttgctcaagatgactcagcaagttaggagccagtgtggaccagatmagtgtccttttctctacaccatgtggataatggatgtttatagcaaagttaacattgaacctgttgagattcatgtagataatctggaattttatgtctcactacttgataatgttcataaattgaattatgtaaccaaaatctgtcctttaccaatacagatatcctattcaaggaagtaaaatttcactagtatcatgggcatctttagcatgtcaatttcagtagaccaagtagaactctagttaatttgttttgaatggtgaggcaaacaaagcatcattattcctatgaacatttaacagtttttgagtaatcatgatggcatgtattgaacattttrgtgaaacaaatatctgctaatgatggaaatgtatttgctagtggtacaagtcttacaagacacgctgcagaagaaccttcagaaaataacctctgaccttgaagaacagatgttctaaaagcacacaacataggggttttgtaaatgagcagcactttggagtttttccaacttttcaaacattcagggaagtaaaaatgtcactatgccaggttttctaaattttcatatttcaaattagtataatttgagggaagttatttaaatgatctgcacattacttatcaagacatatatttctaagtgccaatgtccaggaattagtttgcttttctgaaataatatttaagataatcctttttaaaattaaaggatattttatcaacataaatagcctactcagaaaattatatcaacactaaatcacaggtaacaccatcatgttttatctctatttattttgatttttgaagtaatttaaaagggtatatttaaacattataaagtacactaacaaataaaacattttgtagactcagtgaaaacaaatttatttatttatttagtttttgagatggagtttcgctcttgttgcccaggctggagtgcaatggcgtgatcttggctcactgcaaccttcgcctcctgggttcaagtgattctcccgcctcagcctcctgagtagctgggattagaggcatgcaccagaaaacaaaatattttattcatcattagtaacatttgccagaactctgtgctgtttaaacttcataaagtatatcacatgtakgatattttctagttttctagtctcttctgtatatatgccagaataatatcaaatactttcatttaatcagttatgattattttataccaaagaaatctcattctagaaaagaaggccatctattcaccactcctgttggccattaaccttcatacctcccctttcagtgttctgtcttgggtcttctttcaccgtataaatcccagggttgatttgatccagtcactctgcagcaaacatccttgtatgtctctttgtgaacgtcaacaattaggatatggacttcctcagccttatcagatgttgccaaattgctctccaaagaactaatatcaatttacattccagccagcagtgaatgaaagttycagtttctctacctcccagacatatgtattgtcatgctttaatttttatcatctaatggctgtgagatgcaattttattattgatttaatttttatttccctaatcactggtgaagctaaacatctttttacatgtttatttgtcctttggttttgcacttctgtaaatcaactgtttatatcctttgcctatttgttgtttctttgagcttctccctccttctccttttcctattattcttcctcctcctcctcctccactcctctttctccttcttcttgttcctaggagttcttagtattatctgaataaaaaattctttgtcagttctagttttatgcattacaaatatgttcttccagtttgtggcttgtcctttactttttttttaatggcaacagaaatttaaattctaatgaataaatgtatcagtcttttcatttaacacttaatgccttggatgaaaatgttttatcccagggttatagaactattttcttaaatgttcttatcacagttttaacattttgttgatcacatttaagtctttaatcaatctgttgtttgtattttttcataatgtgaagcaagaatctaattttaatttttccttatggatacttctcatttattaattaatccactagttcttccttcttctcaattttaatgcctttttagtgatacaacaaggcttttatgagtgaggactgctttgaggctttgtatcctcttcaatttgaccatttttgtatcccggtactattattatactgttttaattgttatagctttataagttttttggattggtgtttcagttatttattgctgcaaaacaaaacagtggaggttttctaaaaaatcattattttccatgattttgtgggcagccacaaaattccgtttcccatggtatcagcccaggcactggacratcatgaggtccaaaatagcctcattcgcatggttgactaccacagtgctagctgacaaatgggagctcagctggggttttcaactaaagcctttgtttttctccatgtgggtatctctatgtggctatttgagctttggaaagcatgataggtgggatccaagaagaaatattacaaaaagcaaaggcagaaattgcagatgtcttaaagtctagcctcagacatcactcaaagccacctctgccttattctattcctacaagttgattaaaagaaggtaaagtagactgcacctcttgatgggggagtggcaatgtcactttgctaaaaagtacctgggaaggaaaatagtgttgtgatcatctttggaaataacaatctattgcattctggcaggacaagccttatcatctcattaggcttcttcaacaccattttggacccttttccttccaactatgaatctataaattttagaattaacttgtctggttccatccaaattttataatgtgatttttgagtgaactttcagataacattcttcaacaaatgtttattgagtacctactatgctcttgcactaatgatacataaatgaaaaaaaaaaaaaaacagataaaacctccatctttcattgagcctgtatttcggattatgtggagaaaattaaaatatttatgacctttgttattctaataaatatattttgttttgcaaatttggttaggtcttcttttatgtccttcgtctaagctttataatttcttcttatccgatttattcttagacaaatttttgtcttgtttctcccaacatttagactaagctctttgggcaaatgttttaactttttgtcttctgatagcaccaagtacactgccagatatagcaggacaatgtaacttggtgaacagactgaataaaaactgaagtaaaagatttaattttccatttgtaaatattaatcatgccaggtcaaactatcttaaccaagttaagctcctagaaataagtagcattcatgtagtaagtgagttgccatcactatattcttatagaaggtccctcgtataaaaaccagtaagtaatgtaaaggagcaactacccaggtactccagtggttaaaaggaaaagatgaaaagaaagaaggaagaaaggaaaatgctctccaagctttatacggacatttaacgtagttaaaaatgggtttgcctggcctttgctaatcacacctttagctaataacttcgaaatttgcttctacattaggtacagtgtggaacaaattagctcacttaataaatggaatgaagctcagtgtgagtctctttaaaagcacaagaacattcctatttcatccctcaattaccaaatatctgcaattcctagttttgcatcatgctgaacttctaaagtaggaaaaaagcagttgaagtaatattacaatagcaaatgatacaaaaatagcattaagtaccaaggatacctaaagttcattatttcaattctttactctcaacaagggcagatctgacactgtgaaaattgctgacaaaatcatgacttaccaccaaacagaattttcaacatttcaagttatgattaagataaggaatagcttgatgactatttcactacattcaatactatttatagaatacagctgcagggctttgtatatctaataattattgtgaagaagttttacaaaacatcagtcctttgagaatttcnatacattgtacaagttatttaaaatctgccaaatgttacaatatgaaatgtaaaactaggaaayccaaatgcaacaagtggaaaacatgggctcagctaataccacaacacactgccaagatggaactctccacaaggtctatcttcctgctacttctgtcctggtatttcccagagttcatgccttctcattccaagtatatgctaaatactcctaaatctagatctctagcccaagatgtgtcasttgagcaacagacccatgtttccaattcctctgaggtgtcattgcttgaatgtcacagaaataatgcacaytccataatctcaaacataacccatgatttccatactctcctccttttgtatttctctctccgtgaatagaaccaccatccacccaggcctctatgacagaaccttgggtgtcactgaagacactttttcctctctgttacttctcatatcaaattggttaccaagtcctgggaattacacaggatctcatctttttccttttcttcatacccactgccatagccttggttcaagtcctcatcatctcttacatggcccatggtagcagtsagctagcaggaccccctgcttctagatgtacctcttttaatccattctccaaacattcaccaagtgatctttttaaaacacgaagcagataaagttacccatacctacctgtttaatacctttcaaaggttaccaatattcttgcaggataaattacaaatccttaacattattccctggctcttgtctacatctctatatttttttattaagttcaggttctttcctcatctgctacctatccatgccagacaactaagactcagactcagtctcactaatttgtagctttgcttacactgctccttctgcttaaaagatcttcaaatcttctcccctacttgcctttaacctgatgaatttctactcattcttaaggtctaatacaagcattactgcctctacaaaccttcctgaaatccacagaggaaattatacacttccatctttgtttcataaatctaataagaactaatatttatggagtactgatattgcattagacattgtattcagtggtttattacattattgtatcctataaacataaattattttcacattaccttactattatatcctacacaatcacttgtaaattattttagtacgctttattttacctacttatttacatattttgtaatattatcctactaaactgaaaactacttaggactgaactgtggttcatcttactctctattgcctaagctacttcattgcacaagtaggtctcaaagctctgttgataaatgaagtttaatggtttcaaggagactgatattatataattagagatgttaacaaatgcattaaaaattttaacgcatcttgaatcaaagcaattatctatctaacttagtagctgtgcaacaaagtaaaaagagcaagagtgccattaatatatctcaaagataagcttgtttaataatgcatgtttgggctgggtgcaatggctcacgcctgtaatcctagcactttgggaggccgagacgggcagattgcctgggctcaggagtttgagaccaggctgggcaatatggtgaaaccctgtttctactaaaatacacaagaaactagccgggcgtggtggcgcgtgcctgtagtcccagctactcaggaggctgaggcaggagaattgcttgaacccagcaggtagaggttgcagtgggtcaagatcgcaccactgcattcagcctgggtgagagagtgagactccgtctctacaaaaaaaaaaaaaaaaaaaaaaagcatgtttgtgtcaatcacttatgtgtttatttgagttaattagcgcctatgcagttttctgcttgctcaacttattggaaaaaaaatttctaagggtatgtgcaaaaatattatctaaagtagcatttgaaattttgctctacaattacactgttaaacacagtaattctaaacaattccatgtgaactaacatctgtaaatgttcagcaattatccacctgttgacagtctgtaattcagctttgtgagtactactggtttgtgacattaaatcaagaggtttaatattttatcttggattaaatgcaaaagataatcaagaataagacagacatttagctgcctggatagcagttatagatctgtttatattaatactaacagagagtcaaacagttcccaaaacttttagatgtgatggcaagaataagagcagaagatgatctgcacatcaaacagctttttcgtctttgcttagtgtcaagcrtttggcaaaacaaccctttgtattatttcagcatttcagaggcctaattttccatagttgtgactcacatatcctattcataggcagaggtcttataaaaatgaatgtgactgatacaatctcttataaaaatgaatgtgactgatacaatctgagcaggaaatacttattaccaaatgaccacaaattctttcttgtttgtaaaaattaatttacctgtgttaaattgttttaatcagatttcattttaaaactagcactttaagcatgatttaatctaacaactgataaaacaataacatttcaaaggcatatctagaacagtttaaaccaaattcttgtctgttcataagctctggtaaaacttttagatccctgctatttagtaaatctcttaatatgtattcatgtaactaaatactcctatacactgttttcctaaattcagggttctggatgttcttcccctcattattaggacaccatctctctgttctatcacatttcttcccaagcaagtttgtcatctaaatacctcattaaataatcttataccttattccgtcataacaatctataagagaattgttccccaggcagaggaagtcctcaaatttgttgctatttcctattctcttcttaattagtggctcaactatccacaaaatcacccaagccagaagcctacagtcatccattccactccatccccacactcctaattggtgattaagacctattgactcttcctcctgaatatattgcaaatctatttgttcctcttcaagttcactaccactgcttcatcattcatcacttggattattgcagtgatttttctaactggcctccctgcccaccaggctcagtttcatcccctcatttctcccccattccagctcattcttctacaacaattgtaattatatttctaaaatgagatggctgatgccattcccctacataaataagatgcaaaccaaattcctaacacggcrttttagcacagcctttgcatatctcaccagatttatgtctcatctaccttcccatatactccagtgctacaattctttttctataagcagaaataagtgcctccttactctatgtttacttagcatacactgttgttttagtactagttgcaggaataaaattcaaaatagaagatagaacaatattttttaaagcacaagaagcatagttaatgtaaaagcatagcacaaaataaaatgtagacataaatcaaaatatatcaataacccaataaatacaaagggactaaatttgcaagtaaaggacagatattgcaaattatatttttatgctttttgcaagacacacaaataaaatacaatgacacagaaaagttgaaaataaaaagatgaagaatgacaatgaacagaagaaagtgagacacttgtagagaggcaaaaaaggcacattggaaataaagaagtttctayggaacaataaagaaggaatcagcaaaaaatatagtaattccaaactcatatgtgagwaataacattgtccagaatatacaaagtaaaattgagattagaaagagcaattgtcacagatcaacaataatgggagatttcaatgcacttttcttataactgatacatcaggcagcagaaggcattagtggattgtrggagatacaaataaygcaactaagaagtttgttccaatggctatatgtaaaaccatggaccctacaattagagaacacacattcacttaaatayataataagctttaaaactgaacatatacataaagcaaatctcaatcaacaccaaaaattcagtatcactcagaacttctgtgcatataagacaattaaattagaaatgtatttattactattttagttataaagaaaacggaagacagggcaaaagttaataaaattggaacacyatagaaacacagaaaaccctcatatttcaaaattaaagatatttgtactacttttatttatcattttcaattgayggtttgcactcaaatatttcattaagacttcagttatttcaagaatttaaacatgattttatgcattaaaaggtatcagttaaaagacctgtgactgaataaaaatgtaaatcaattaattaaaaataggcattgctaaatcgacactggaatctgaaattatcatgggccttctgcctaacattttcaagaaaaaacttgggattcctgaaaaaaatatataatcaaggataggtaagcatctaataattaaattaagatcatcaatttgtattacacagaaaactgggctgttgtcatcttgtatggatcagaacatgattatgccataaaatccattcttctagcttcaatcactattgtctctcttttctaactatagaggtgatcagacagcatgcatcccttttaggtcacaaaagaaatcctattaaatgccaacctataaatggtgcttccggaaacataaactagatcagggttagtttgggatgaaataggccttaacttagatagaaagtagaaatgaataatgtacatttcataagtctttaagcaaaaaacaattggcaattttactgtattttatcaatttatcttagttgaattttatatcactgacagattacttgaccatcaatttttctgatttgtatactaattctagtcttattttcctaaaatgttttcctaataacagcaatgtattcagaaattgtaattaaaagtcattgaaggtcatctgatttgttgtgttggctttagatcagtgactagattttcccagtcactgctctgtcagctttaatacaatgcatccatttgtcttactaacacttcaatttatgggatagctgtttttcacaattaaaactactgaarctttagtatacatggaaatgatcatgatagcattttctccatatttctaacaactctggaaggctctattgtaaaaatatagggccttccagatgactagatctggtttcctgaagacagcttttaagattgctatatgagctcaagagaaacatttacaagaatctttagataaattactaagtgctgcagaagtaaaaccatttggaatagatttctaaactcctcttacataaataattggtgagtgattgaggtaagaaaaggctgcccttactcttgctgacccaatagacaagacagctgatgacgaaagttgatggcgaattggcacaagaaggttaaatgcaggagaaatgaaaccgatctacttattgtgatgatgttgactgctacctagttagttctatgagagacaacacctacttacacaaggtcttccacttaattgggcttaaggccagttcagtaatcacaaaattacaacaagctaaaaattacaccaatcacctcctccaacctctgtatctataaagaaaccatgaacttatataatttacccaggaaacaggagtcagatctgctgcctcctattacaggagtctttacattcaattaaactgaattagatatatgaattcaatagaagaaatcttgatgtaaagtcaattagtataaatacaagtcctccctcaccccacacctgacaattacaataaaattctatggggagcgcattatgaagagtagagaagaatgccagtgcaattctgtaaaagctaaggcaatctgagaatttaattttggtatgtctagccaaagtcaattactcatgaacaacaggctggaaagtgaccaagggctgactcagcagctttcaaactcttctgttgagtttaaaaaataaaatgtgaaagtagagagagaaaataggaaggaatagtccaagaaaggacgataaaaattaaataggccaggtgcagtggctcatgcctgtaatcccagcactttgggaggccgaggtgggtggatcatgaggtcaggagatcgagaccatcctggccaacatgatgaaaccctgtctctactaaaaatacaaaaattagctaggggtggtggtgtgtgcctgtaatcccagctactcgggagggtgaggcaggagaatcgcttgaaccagggactcggaggttgcagtgagccgagatggagccactgcactccagcctgacgacagagtgagactctgtctaaaaaaaaaaaaaagaaaaaaaaagaraaaaaaattaaataaactaataataaaatcataaaatctgggctgtgagttcacttctagaatgctaggtactcatggaaatttacctaaaaccaaaaaggtgaagtaggagctgaagacaggggtgggggacagaaggatggggaaatgggaatggggggcacagacaggtggaaaatttagaggaatatagaatttttcaccagcttgaagtaaaactttctaattattttaaaaaaccttataatatatcattactatgtagaattaccaacagataaatttagtctttaatactcaaaaagaataattttataaagaaagttaccacaagacaactttagtggatcctaattgtattcataatgcaatttacaaaactgtgatttacatacatcttgtcaggcacacatcaaggacacaaaaggcacactcacactatctcaaagcatgtaataaaaaagggtgctataggaaaagaaacccaccagtttctactgactgtatctcttccttttctttctgtttagccttgtcatcattaccaaggagcttgctcattcctaaaacacatttgctacaaccaggcatttctctttcagtcagggcttcaccatggctgggaaatagacattgaggaagcagagagtgcagaaatgggtatgagtcttagagtccgaagacctaggttccgaggaggtcaccgtctggttgactgaccatactcaagctttattaacttttaggagctcagtttcttcacctaaaaaaatgagatcgttggattcaatgatctctaagctctctgacttgaaatggattcaattcactaatttcccctttttgaattttcctcatattctcttaaacagagtcgaatgggaagctttttcaaaacaataagtaattatttcttatctataatattctacttatatatcaaactgccctcgcctttgccaaagccctcagtggacaaataacttcaaataactactawttctcagagcagtgcaagtcatctaggatcattgtttacattctatacatattgaaaggctttctgtaaaagtgagaaatgttttaatttttaatgataggaaaagtaatgctttctacaaggttgaatctaaatccaagccatagataagagctactttaatttaactggtatttatggttgaggagcagaaaacaaaaagaaaaaaaattcctttgaaaatgtttatttatgacagtctaaattactcctttgacacaatgaacacaggtaaattatctcagagctgtgtttaatggctctaatggctagctgggtactgggccatgtatttcaggatgcctacttgtttataaaacttgtttccaaaaatcaggctaatatagtactaagttaccaagcagaattttttttttaattccagagtcactggccatatttcatatataattgctgggttaaataaacacaattaggttttatttagcatgtatttgattatgaatgtcttcatataaataaaaaacaattttttaataaactagactaggaaaggataaaaacttagtatcattattattctaaacataccaaggctcaagttttcattacctaaaatatactcttcgtaagacttgtggctgccgaataaaatacattmatcagatgcagtattgctttcacggtaattatgatactatttataatgccatggttatgttcataggccactaacaaacatatgcagtcttttagctacaacactcaaacataattacaatgcccctttccattgaaataatctatgcatcccgccacagtgacttcattccytaccaggatgcctgctgaatcagactgccccaattattcaggcacagtgcctatgcttatgactaataatattggggaataaacgaaattaatgtccatgacttcctgaccattttggccaatctcctttctttggtgtcttctgctttaaccctaatactgagtaatcttgaactattcctggcataaaaagagcttcacatactgtacaaagtcttcaagccctacaccaatatttcccatagtatgttccaagtatttcagtcttaggggatattgctcaaaaaaatcagagtgcggagaggttccaagatcgaatacttttgggaaactttgcatactatattcccaatccttaggattctcctaatctattcatatactgaaggctcttataagtcctgaagtaaagaaatattttatctacatttaactcacgcaattgcaaaacttacttaaccatgaaacctatttcatattactttttcaagtgagtcttattaacataaaactagtggcaaatatttgggtgtccctgtcttcatgcagaatttgactgcccaggtcctattcctctagagactagttagattctggccagttaactggagaaatcaatacaaattgagaggttaattttgttaatagattcatgtgttgtctctagcagagggtggttgattttaacatacatttgcaatgcatcagccaaagtgcagcataaaacggaagagaataaactgtgagactataccttgcacatgtttyttattgcatgagtaagttctatatcaggtctggaatttctgtactcaaaggacttatattctgaagcaacaattacaaatattgagtggaggtaatatttgtggacattgaatcaaaccagttttctcacctaacataaataacttacctgcattttgatgttaaaaaaaaaaagccacctgccaagatctggctgtggagccatggctgtgtatcagccatgtatttgagtagtgacaaatacttaattaacagggtcattgaattgagaagaaggcctgaattttgatttctacaaaaaagtttcagagaaagatttttgctttaaaagtctgactctttataaaatttcttcctgtctttaaagaaagtcaaaacatggacaaaagccacaagccacctatcaatattcatgtgaatcaaaaaattaaatggtaatgatgaggatgagaaaaggagagaaatgtatcttgcttccctgttaaaatgatgacacatgtaaggacagccccatggcatggtgtctgatacttcatctctgttagctttttcttcccataatgcttcttccctcaaaaaatgctgatcacagaaattttgaaacacaagatatttgtggctttttttttcagtggaaaccatcattattgcctgtaaccttgatccgttctaatagaggactacagaactaatcctacaataagtcaagataactgatggcattggcaagtagttgaaatccttagtctaacaaatactgctttcaaaagactagtatactcactgataaatgcctttttaacttatatcatgtcaattatttgctattcattatctttataaaatatttcctggtttggggaactctgcaagtttcttgtttctgatgctttgtttaaacatatacaactatgtatgttcagtctgacaaagccaccacttcctccagccaaaagggaaataactctagtagaacgcagtattttaagaacagattttgttgttaggctgtattacccccaaagaaaaggacaaaattagtaagactgaatttgttactatttactcgccaaaccctcaaggtagtttcatagagataatcacaraaacaggaaatagtacacaatgtggkattggtgtttttcctacaagctccttttcctatggattattttttttccaatggagagaaatgcttttttacctggataataaattaaaaagtggtttcttgacattttactgcttttatttattccatttaaagaaaatgatttccaaagccagacaatggtgctgttcaatagaaaatgatgacctttaattaaaactctgccccttactaattttcacatctttaccaacctcctcatcaatgtggaagaggcataattgaagggagaaaacacctgatctaaatacactttatctaaatcacttcccccaagcagacattctctatctcarttcctagttcatttccttcattgtatttcctaattcaaaattatttctttcttcacctgttcattgtgcctgtgatcacataggccataggttttatatgggagggagctttgtagactagtgacttcccagtgttattgctgaagaaaggaatagataagggaagaggaggcaaaggtgaatatatctgatgaatcggaaaaaaaggtatgtggtctcaaatcgcaattaatctctaaatgtaacaagcaaaagcaaaagtaatgcttttgtttattttactccatcttttttttttttttttttttttttttttttttttgagacggagtcttgagctgttgcccaagctggagtgcaatggtatgattttgactcactgcaacctccgcctcccaggttcaagtgattctcctgcctcagcctcccgagtaactgggattacaggtgcatgccactatgcctggctaatttttctatttttagtagaggcagggtatcaccatgttggctaggctggtctcaaactcctgttctcaggtgaccygcctgccttggcctcccaaaatgctgggattacaagcgtgagccatcgcacccaacctactccatgatttttttgattatttattttgaaattattcagcatcttatctcattattccattattacagtaattatctaccacctgttgaacagtacagtgccaggtactttacaaacaactttgcaactatcttgcaaggtaagaactcctgtgcctgtttcttgcagggaagctgagttgcataaagtgaagccacaaagtcacagagacaggaagtggcagagtcaggatttaagtttacttctgcctgattccaaagctgtactctcttctctacatcacaccacttaactattaagtggtgtgataaagaggtatgcttaagcctcttaaagtatctgtcttaccaaattgctaataaactttgcaaaagtcgaagctagaatctatccccctccaccccttctctttctccctctttctgtgctatgtatatactactctacatcttgaaaagagtaattttatcttcatttgctttgtagtttattcaacttctatttccaaaaacttagctttttcctgggacaaatcccccagatgttttctattctcttataacttcaacctctacctgctaaagtagaagtctcaattatttaagagattcagaattatgtattataaagtttacaaattatgtaataaaaatttaaattcatttaaaacttgagtaattatgatgccatcagcacactataagatgtaaacattttaatggtgaaatatttaaaataaatatctttgaatgttcaaattctgtttgatayatttgttctctttatttcctcaaaattacagtcttaaattttttttttcttttgagatggagtctcgctctgttgcccaggctggagtgcagtggcaaaatctcagctcactgacacctctacttcccgggttcaaggcatcctcctacctctgcctcccaagtagctgggattacagtcatgtgccaccacgtccagctaatttttttgtgtttttagtacagatggggtttcaccatgttggccaggctgttcttgaactcctgacctcaaatgatccaccctgctcagcctcccaaagtgctgggattacaggcgtgagccaccacactcagcttacagtcttaaaaattatgtattgcttattggttcttcactgtaggttcaagagcattgtcaattatgcctctgtgactcctaaaccagattttaccttcaaattcttgggtgtcagttcctgtttagcatcaacacattgaactgaaattagactgtgactcaccatgtatttccaaggaattaacaaattggctctttttcctctcccactatttggatattgaaattaaagtagctaactttaaaataatttcttgatttttaaattacccttgaccaactttttattggcttcaatctgactttttttttttaacataaaatagcccttaaatgtatacttatcatgatttttttcatttctaaaataagagataaaatatttgacaagcaggactttcacactgtaggcagttcaactgccactgaaactttaattaggtcaaacttggaatctaaaatcttaaaatgatatccagtaaaagggaaaacctgaaaacataaggtaaaggcttttttctgaaacccttgccagtgtttccctgtaaatgttacagccttcaaagaccactcaacattwcccaccattttaaaatccataatttattacaaataagtatagtagaaaggttctattccatactgaatatattaataaaaatagtatttttaaaaaaaaagttcaaaaaattgtcaagtaactcaaaagttacacataacataaaaaccattcacctcaaaatagccattatttcagatattttgataaaaatatatacaaaggaagctacagaggaagaaaggccaacaggtaatgtggataggaactgaagatcagttttgttaaaatggactcaagctacccacactatattaaatatatgtaccatattaaatatagctatacttgaattaatcacagtataagaactttaaatgaaattaatgaatttactaaaaaatgagatgtttcttttttcttgtttttttttaatgcccatctttatcctgcagtagagataaatgtttcttaacactccaaaatgtattgtgtaataaaatattgatgagttcaggaaaaacttatgctttaaaaagttgggaccattacttgctataaaagctgaagaaatgaacgtattaatgttttatcctaacttccatcaatttgatattatatttttcattgttcattcatagtttctattttattcaataaccatagtgctcatggtttttaattttcgttctgaatttacattgattaaagatttatattcagttttttagttggaatccctccatacctgaattgtttgtcttgattcacctcttagtaggctgaaattcactacagcttttttgtttgttttgttttgtttttacagggtggctattcaatttttttttacttataagaacaataatgtatttgttcataattgtgtgagttagcaaggcaattctcatcggggctggyctggctcatctctgaagtcatctgccagttttgaaggggattgatggtctaggatagccccattcatttgtctggctcttacaagcttgttggatttagaagccccagctaggatagcacatctctgctccatgtagtctttcatcctccagtaggctagctcaggcatattcacaagtggtagcctcaggattcaaaacagcaaaataagacagaaggccccagtgcataagaatctttttaagtctttgtttaccttattgtttttcagtgttttcttgttttaattttccttaatgagggtttatactatcttgtgtaacttcttatgggcttgaaaatgtttgtgcatttgaatttatatttaaaagataacttgggtgggtataaaaccttggtatatactttcttgtactcagaatttttacacataattctataggattttggtatttaataaacctgtgggaaaactaacctcatttttctctcttccatgtgacttgatattcatgctgaataaacacatacatgtattcattatttttaatatttattaaccttaccgtgatacagaatgccattaaaatcatatgtaagtctttatttcaggaatttatcttctactattttaatattcaagaatacaaattatatttatattggatcccttttttttcttttccacatctttcatcttcccataataaatgttgtgtttttgtgcatttgaactaaatwttatgggatttttttcaaagcttttctccatatttctaacttggttttcagtcacatttattccacttgttgttattgcttctaatatttttgtctatgaaagctttcgtgtttctctcccatttctctcctgatatacataacctctttcatctgtttttcattgaacctctactttgattctcatagatattttttcaggctttttgtttgtttgtttgtttgcttgtccgtatcatatctagtataatttccctgagcgaatgggtaatttttatcctaatcttccaatgttttttgggaaatttctcttgtgatttttttatacagctctttgttgtgttattatctctttagtctcctttctatttgatggttgtagattgagagaaaaaacaggagcagtttgcagtctcttgtttctcttgctagacttttttactccattcctctgtcaccaaatctcttatttcyttttcccaggtcacacctctccatctggagtgagtggctaaaaacawatccttttgcatcagagactttctatgttatggtttgtacrtactgtctcttcttccttcttcactcctcttcatctctggcattctctggttctgaaacttggatctaagcaagaaccctgtcattctagtatagattcttcttcagctacctgtcctggaggctttagggattcaaacttgtccttccattactatatatctcttccttctgagtcagggctctttagaaccttcaagattgtgactcttgcttttggagaattatttatcatactctaactagtactatggcattacaagaaaaataaacacacacgcatatgcactaaagcagaagattacacatatcatttataaatacatattgttctttagaaaagttattattatagttatagcaactaacatgtctcataattgtatgtaggcaaatatacctccttcccacattagttagaataatctttggatacagtaacagaaaatccaacaatgttttaaaattgttttaaaatatgttttaaaatataaaagggtttatcatttacctttgaaaataaaaagtcaggaagtagtgtcacctaatgttggattgctgacttaatgatgcctaatatctctccaattatttttggcttatcacctcatagtccccagatggctgctatcctgtaggtattagatctgtgctcaaggcaagaagaagagtggggggagcactagctacaatcatcctcttttaataagaaaacagaagcatctttaccaccgccaccaccactatcacttccagcaagtttctgctcacatatcagtagctgctaggaattttccaatgcttttgtatagccakgcaagaaagaagagtgttagcaagagctttcgactcagccaaccaacaatgtttgccataccccaaatgctgaactcctccacagaaaggatttgagcatatccatatttgtatgcccagttctcagcagagtttgacatatttgtagatactaattaaatatttgtcaaattatactcctttatggttaacattatttcttctaaacctaacaattgaattgacattttcaaaaacacatttaccatgaatcttagacaactataatataatagagaatctacaatataaatctataaaatctcatattattaaactgaaattaagattatttgtcaactatgtcaatataggccaggcgcggtggctcacgcctgtaatcccagcactttgggaggccaaggcagacggatcacgaagtcaaggggtcaagaccatcctggctaacacggtgaaaccccgtctctactaaaaatacaaaaaataaataaataaattagccgggtgtggtggtatgtgactgtagtcccagctactcgggaggctgaggcaggagaattgcttgaacccagcagacggaggttgcagtgagccaagatcgtgccactgcactccagcctggggcagagcaaaagtctgtctcaaaaaaaaaaaaaaaaaagctagcctgttctgtttttaataataaactattcagaaggttacaaattcagtagaatacacaattgctagtgaaaaaaacagaaatttacccatagagtgcaattaggaagccagaaagtgctttacagtgctgcattgtctttctggagttaaacttaaaactttactgtcaatatttatggaaactttcattctattccataacatgtacatgttggtgataatataaatgagtattttttccctaaaatttttagtagaatttcaccctaggctatgtgyaactttaataatgatgatgataatgatgacgatagcaaatatatagagtgcttacatgtaccaggtacttttctaagcactttatatgtatgaactaatttaatcctcataataaccctaggaggtaggtattatcatcaaccatacatacagaagagaaaatggaagcagaacttgaggaagtaatttgcccaaggacctacagrttgcatgtggcagaggtggaattcagtcccagatcatcaggccccagaacctggcttcataaacacctgcccttgaaacccactatggagccccaggagtacccatccatggttttgaccaacattacctcctctgtcatttcaagaactctataggcattatctttaggtttaatatatgaggaaacagaaacttaaagaaattatggtaacttgccaaaaatcacaagctccgtagatacaagtcaaacacaactctctctggctctggagtctacattcttatccactgtgcagtgcactgtactgacagaaggggaaaaccctacagtgtgtgatgcacttcctatgtcacagagtatgaagaatgtcacaaggtcacggaatttcagagctgaaagggatcatctagtccaacccattcatttcatgggtagagaactgaaacccagagaaaatagaaatgccaccacctcggtgccagatctcctagatgcccacctacaggtcagtcctctctatagtatcttctccccttttccctttaggttgatttttcatttaaaaattatttgatataatataaattgttatagctcacaattgtgaggaaattataaatatttgcctttatgattttagaatgatgaaaacctttgttattctgcagactttctccaaagctttatttcaaaaagcatcattgttctttttcatcttagaaaacataaaacctacttgcttgtcttcaggaaccctacgaagataaaaattatcacaatttatacccaacatacctaaagaaccctgtccattgtgccctcattggttgtcctcttaacttggacaaatgtaatcacgtctttgaygtatttccagcttcacggtggttttggatatacacttctgtaaaatgatcaagatttttgttggaattcacgagtgtttgttaaagttttattaaaagcgatcctagaaaatataactagagcttactataatatgttctgcaggtgggaaaaatgttacagctccatgaacataaagcaatcattaattagcagcaaagacacgycattttcaatcttatcttttcatgattttaaaaaaaccaacacttttcccttatattttccaggtaaggcatcttaccagttcttatgcactgcaatggccactaggtaatattctttaagcaatactgttatacatattattatattacagcaatcctaaaygagataggaaagacatcatctttcattttctacatggagaaattaaggctcagagaagttaggtgaaaagactaaagtcaaaaatgctaatgggtgtaagaacctgactcaaattcagatctgtcaaatgcatctggtgtctgtccttaatactctattaagttgcctctcttcatttaataaaattctctaccattcaaaattaaagttgtatatctataatgtttgctgtttatttcagtgagtagttatttcagtttttaatagatatgttttcctttattaggatttgttaaaactaaaaaaattaataataacttcaaacaatcattgttatcatttccaataagcaaagcagacaatttaaagagacagaattctcagacatgcaatgctatttcaaagtccattcacgtgctgtgcaaaaagtcacattaaaacactttatactgaactataccatgacctcggcaaacacagtactcctaaaagcacagttatacttgttgatggctatgagtacagattacttccttttcttgatacaaaagtattaaaagtattaataccatacagttaaatctgaggaataattaatttgaaggaaggtaataggcaggtaaagcagctcagtataatcaaaattttcctttaaagaggttgacagttactctgatgtaatatcctggaagtttttttccaaatgtgcacttctgatttgcatgaattttaaagtcattactggtgaatacagaaaagatacaggcccactctcacaaggatgtagattgatctctgatatctagccttcccagtgtgccatttggggtgtgaaaaggtaccccagagccccaaggtctaaaaacccactaaatcagggtttcccaggactgctgttttataaacactccagagaatttgtctctaaaaacaagtgatgaaggacagagacaaaagggggagtgtaaaaaataaccttttttccccttaaagcaaagaatcaacattagtttgtattttggttcattgtagaagtcgatcactattgtgcactaatcatttcactagaaaaagtatttcttttcctaccattcttcaccatgcatgctttagtgcttcacaggtgtacaagtgattttcttaaatttataaccacagtagacttacatagatcccttataaaattgatgcagcagtggtaataggtttacacaaaaattgtaatttatgtcattctgttttgttgaagggaatcttggcttctatttacagctttaattaactactgtatacttcctaattgtataacctgtgagattatggactatataacttaagaaatatctttatctgggaatcccaggtggtgcctgtttgtaacatatgcattcttgaaatatattcttctagacaaaattagtttttagattaaaatattggagaagatactgttcctatgatctcttttattttgtacttcaattccaaaatttataatgtatttgccaaagactttctttagtagctaatggaaaawaattctaaagaagagatggtggtaaggctgtaattttttaaaagaatgactattctttcattgagatgatatatgtcctatataaaaacttcaagtaataaagagaagtttcagaaagtttcactttaagtcatccaaattccatttatcagaaaaaaaacagccatctctaccaccaagtaaacatcattccaaacatagctaaatgtttaccaaggtagaaaaatggtcagagagatgtatacatacataagccttaattttgaaaaaaatgaaatcaaattatatatgcattttaatatttaaatgttatattttcttttcctttaatttgactaaagaaaatttgaactaaaaactgaaattcaggtaaacgtttcttaaacccaaaacatgttttcttttctacaagggcactccaaagttgaggtaaaaaatggaaaaactttaggaggttagaatcatctgtctatttcaacattaggtagtagctattaaccccatgctatgtagttagggaaattaactgatacctcttccaatattaccttgtcacatattaatcattttcattaacatgctttcattatcatagtttataccatttatatgctattctctaatttctraagctgttattttttatccatagatagatttgatgctaaccatcttaaatcagagttcctccattcttgagctactgatgttgactcatcatgtatgtgcatgcacatgagtttaaagaagagctccagggttctatattgtctaagttttgtttcagaatgtctttctcttgatactatatttgactgaaaataaaacttgagtcatacttcccctccttcagaattgtgtagtaattgcttctctgggttctcatattacgtggaaattgaaagccaacctttattctccttacatgtagctggtatcttttccataaatgttcatctggttgaatatttatccttggagttcaggaaacagtttaaagtatctctcagtattcattgttctatctaaaattgtcctagaacagagtatgaacttcaatttgaagattcaaatctttgtaacaattttcttctttttattttttatttttattgattcatttttttctgttccctattcttaggatcaccaattacgtacatgttgtctctcttttccctgtcttccgtatctttcttcattataaaaacttcacactgttcatacacatttcattttgtcagatttttttccaacctagtatctatgcttgtgactttgttttcaatcaagtttattctatttgtgttgcttccagtgtctattttatttctgtcatttttttcatttccattttcattttttactgaactcttgttctgttttcactgcttttattgctgtatactctcttctttgaattcatctgtctcctttctgaaccctatttttagaatacgtatttgttgtgatatacacttgtgtcatttatttgcttgttttcctctccatgtgtgaaacagaaaatggtagttttatgcatgagtttatccactgttccctttctgatcgctactcctctttgaatgagatagcaactgaccaagtagtacaatggggaggggaagaggaaggggatagctggaaatgtactgaggaagttggcagccactatttcagcttacgaactcaaacatcttctttccaaatattttattttcttaacattgaaagtagttcttccctcgtttctttttgtttgtttgttttatttaaggagtttgcatggatcacagcaagtttccctacagcagtgtaccacctacttcttccaccttctttgacagactgcctgggctgaaagacaaagtggtagagaatagaacgaggttgttggcagaaagtccctctgaggcttcccttccctaccattctagagtctcaggcgggatttctacatggttattctctacttttcttatgtatcacgcagaaactaagctctctttaatcaaaaactaccaaatatttttgggggaaaggcacctattgataatgtctgagtcaacatctcttagtgggtttgattatctatttcaatatttaatatatggacttcgtaatttgtatcattgcagttgtgaggcttccttgctttcttggagatgacaatattttccctcttttttgacttctttgatatttttagtagactttgagaaagtaagaaaaacacctctataacaatatctaaaactggaatgatacgaatattttatatcctatcaaaataagttttaccatcaaaatgtctggttcaaaataggggatttctaattagttcacataaattgtatctactgaataccttctatatacgagaagaacctagacacttggctaggtgcaggtgtctgtacaaaaattaatgagccaagatctggaatctcatggagctcacagatttatagctaatcattgtataataaaatagatgtaacaataactgagcaaacaatatattcacagtatgaaaatatgggatttaatattttgtgatttccaaagtgttttcaggtccatttaactaatattcattgagggctatgttagatctaaaaacattactgaaattgccaacttcaaataaactaggccaaggttaggttagttcccaagaacacagtgaggttaggttagttaccaagaacacactgacatagagaaaggctgtttctgattagaatctaggattctttctaccacatcctgttgctctggaaagaagaacagagttgattatgtggaataaaaagaaatctactctgtgagccacgattagtcctccacataccatgctggcatccacaatctatcttttgtgtaccacactgggaaccacaatccatcctctatggttcggcctttaagaaatatactgtgattcaccctcttgcagtaacagaaactcatatggctctacctacaacaccagccatagttctaatgtttggaagtggaggtatttgaaaatatttctttcttacaggacagttagtaggttaatcaaaaaagttgacaaaatgtgatgtcacaaaaatcatctgtgtgtgtgtgtgtgtgtgtgtgtgtgcgcgcgtacaattttatgtgtacaattttattttgagatggagtctcactctgtcacccaggctggaatatagtggcccaatctcggctcactgcaacctccgcctccagggttcaagcgattctcctgcctcagcctcccaagtagccrggactacaggggtgtgccaccacgcccagctaatttttgtattttttaagttgagatggggtttcaccatgttggcaaggctggtctcaaactcctgacctcaagtgatctgcccaccttggcctcccaatgtgctgggattacaggtgtgagccaccatgcctggcctgtggatatatattaaacatatattttaacttaaaatatataaatgttaattcacttttcaagtgtttacagtagggccaagactttgtattttggtagtgattcactcactataaatatgtacttttctgtattttccactttcatttatttttacttaaaatgagagcataaaggcatatgaggccaactacagyaaatgtctatgttttatgaggtagtttactcttcgctttcacccatttctgatttgattcctgattcctgattttcttcacccaactttttaaaggcaacaccccttaagtcttatcagcatattcaaattggttataaatgtccaaaaccacatttgtattttgcatttctagtatgttacatgatatttgattaaattacataaaaaatctagtacaactgttataaacatgtttgggaacaaatacagatgacctttaaataaggtttcaattcaactggtgagagcagtaatagacagacctgctagtgttgttacctagtgattaagtctgtgggctctggagccagaatgcctgggtgtgaatcctgatccattacctactagcctttttaaccgtggacaagccacttaacctctctgtgcctcagtttcctcatatgcaaaatgagaatgacattaattaaggttttgttgtgaagattaaaggagttaatttgagcaacgcacttaaaacagttcatggaaggtgttaagtgttgtgtataaatattagatattattactacccaggcattcagtgtataagagacgccagtcaatgtgttttgcagatgaaatggaaaacactagctaatctggcaagtgggttaaagggaaactattaagacaaactctgattttcagtatcagtttgttaactagtgacccttattagatcataagtatcttgagagcaggaattagatcttctgttccattcactattacatatctaatgaatacagtgcctgcacttactaaatattttctgagttaattaatgaatcaagttcaaatatggtaggatgataaggtttttacaacaggatatcaatactacctcataaatatgggttacttcacatttgaaaccattcttgccacttttctttttttaattttattttattattattttgttttgagacgtagtctcgctctgttgcccaggctggagtgtaatggcgttatcttggctcaccacaacctctgccttccgggtccaagcgcttctcctgcctcaccctcccaagtagctgggattacaggcatgtgccaccacgccaggctaattttgtgtttttagtagagacagggtttctccacattggtcaagctggtcacaaactcccgacctcaggtgatccccctgcctcggcctcccaaagtgctaggattacaggcatgagccaccgtacctggtttcttgcctcttttctaattgattcttgcaagaactttatcgtatataaaattatgtacactttataaataagaaatatggagtacaaagaggttgagtaatttgttccaggttacacagtgtgagtcattgatatagctggggctcaaagtcaggactcctggaggtctccctatgtaatgtcatcccttccatataaatagtcttaaaataacctcagttaatcctttgtctccatgaataccatctaccctgtttgtcctatttgacttttgatgctccttactcactttaagttcaaattctaagcgtccgtttatgaacaaatctgttcctcttccgttcttgcctaattttctccattgctgtaattctaccataaaaacagccaagcatgagattaaatgcatttatgaaataagaacgtcacttgtttaatttgctttaaatacctcacctgtgatgcatttaacaacataattgtgttaataccaatatcactgctttccctcactgtgtcaagaagtacagtagtttagattctaccaaggtcaccttctcttgcagcacagtcccaaatcgccttacaataaaaaacatgttgtcaaaatcaatgaatggacagaattatagtattttttataatcatagcttaatgaaattaaatgggtgagccacctcaatctaagccaatctttaaaatatcatcctaacaaatgaagcaaataagtaaagaactattatgtgggaggggaagcaaggggttgacaagcgctcaaatatacagcctcatgttaaattatattattaagagcacaagggcttctttatattcataaccattcttaataatatgtcccttctgagcttttattatcttctcttatgaatggatggcagcagggatattgtaacttatctcaattgkaagttaagctatgtaggattcatctctgttcacttacagagtctaacaatttatcccctctataagtttcacaatagtcttaagtttattgaactcaaaccattcaacaaatatttactaaattttgttatgtcttatccactgtattgggcactgtagagaatcaaagattgcttaaggacagccccttacttcaacgaacttaaaatggaatggaaaattcagatttggacatcaaaagttatttaaggggagaataagcactaaaacctgggttttaaaaaggcataatgaaaatacaaactagattaattctaatggaatgaccatgtaagtttcagaaaggtgtagtatttgatggtttcctaattagtagggttggaacagaggggcttcagatgaagagatgagagtgactaatgcatggaagaggaaaataaggggcctcaggaataagagtatgacattgtggctaacacttacactacccggaagatagtgtgagaaaaggctagaaggctagttaaaccttgactatggaaagtctgagataccaactgaagagtttgcccttacttgacagttaacaggtattaaaacttctctttgtttcatttttgcagtgggttgattatatacattttgtaactattactctgacaggaggagataaaatgtgatggaagaggaaggccagtcaggctattgaaagtaatttaggcaaaagtatcaagatcagaaaagaagttcaattatccaacacaatactgggaaaaaaaagctcaactttgtcaattattaagcaaagatatatacagaatatagtaccatttcacacctttaaaattagccaaaaatttaaacaataattgtgaagttaaaatgtaagaagcacttgtatacaatcagtgaataaatcagtaaataatacttttggaaagaaatttgatattttaaaagtcatatgaaacatatatattttactgaaaatataaaattttaaataccgttcatacaaagagtcactgtcatgttatttgtgacagtaaaaacattaaaaaatcctagatgtctaacaaaaattacaataaaaaatttgatgggttgctatgtagctatcaaaattataatcatgaaagttatgtagtgatatgagaaacatgtaaaaatggaataaaattgtatctatactattattgcaactaaaatgtaaatatatattccgaaaaaaatggcaaaagtacatataaaattaaaagttgagatactaaaaaatttcctcttaagatttctggacttcttaaaatgtgcacaataagtaatttaaagcattaatgtgatgctgaattaggacaatggcaatccaaatgaaaggaagtactataaagggaaacatggtagaaataaacaggagtgaagtactaggagtttgaagggatgaatgaaaagaaggatgcagacttagaggctgagagcctggtagaatagtcagagaattaaaagtaaactaaaaaggtttattcatgccagttaaagcaaacaagttctgctctaattgttaagtcgcaatagacctttcctacgcatttggaagtacgaagtgtatttctgaagaaatatcagtgctaagacaggaacttggaccttccctgaagtagcttgtatttgaagccaaaggagtgggaaaaaaatatatatcaaatttaaggatgtagaacaagaagagaagacaactttggaaagaacatggagcaacacttccaatataaaagataggaaattcaaaaaagctacagaagcactctggaaatgaatagtcagtgttagagatccatgttagcatactgccatggcaactgagaaaaagctttttgtacacacatgcctctgtgtgtgtgtgtgtctgtgtgtgtgtgttctatgaaggaacaagttatccacatattatagagaagtagaaaaggaaaattgggaaaacagatcatagaagttggctactccaagatgaccctagaaaagtagttttcacagactaataaaaataaaattttcagagatgacaaaggaaatggcaggaaggtcatgaattttaactatgccttcaaaaaagtgaatttagtaaggttgcagtgtacaaagtcaatatacaaaggtaagtatactattttttaccaaccacaaatgatgaaaaattttaaatatacactgaaggccgggcacggtggytcatgcctttaatcccagcattttgggaggccgaggcgggcagatcatgaggtcaggagatcgagaccatcctgactaacacagtgaaaccctgtctctrctaaaaatacaaaaaaattagccgggcgtggtggtgcacgcctataatcccagctactcaggaggctgaggcaggagaatagcttgaacccgggtggcggaggttgcagtgagccgagatcatgccattgcactccagcctgggcaagagagtaagactgtgtctcaaaaaataaataaataaataaataaactgaaaacaaaattttctgagtgaaatttaaaaagactgaaataaatggagaggtataatatggtcagtgattggcatactcaatattttctaatgtcacttttccccagttgagctatgtatctaattcaatgccaatcaaaatccaggtagactttttgtagaaattgacaagtagattctaatatttatgtggaaatacaaagaaccagaacagtcaaataaaggaaaagatggtatggtaaacttaagatagtatcaagatcaattctctaggtaatctacagtgaataggccacagaagatagagacccagggaatgtgaaactgctgaaaaggttctatgtagagtagaataagacattcctccatgaaaagtttcctcatggcttttcatgcttcctgaagtcaagaacttcaggaaagaagcatcaaacttcagcaataattccaacccctgacaatccaccaggcttatccatggatcttctatagagaacgatgactaaaatctacccctagagctgattatttaatagaatagctctaacttaagggatctatgataatacatgattcttccacttctcatacccaagcaaagtctaatgctgtcagacaaggtgatgatcctcagcttggaaagacctaaagtgggaatgctaattcctgtctctatactgtcattagaatctatggagaaaaattgagtcaatatgtatcgatctatttcagaactactaatcttcttacaaagacatcaaggaaaaattacatagaatataaattgctgaaacatgaattggattttacttaacataatatacaagaaagcatgtaagactgcaaggttaggatacaggagttttacaattttgctacagattatgtaacttcaggtagaatgacactcaatacttggatggtgttactatgaaattcatgggtaagaagttgggctagataatttctaggattattttgggttattactcaatttctaatcctcagagtctatattaatttcctcttgctgctataacatattaccacaaatttagtggtttaaaacaacacaagtttattatcttccggaggacagaagtccaaaatcagcctcactgagctaaagtcaagtcagcaggactgtgttccctccagaggtctaggggaaaatatgtttccttgcctctctagcttctaaagactactacactccttggctcctggatccttcctccatcttcaaagccagcaatgtggcatcttcaaatttttctcctctctagctgcttcagtcatctcattgtgttctcgtagagtctgactttactgcttctgtctttatattttttctctcttaccatgaccttcctgcctccctcttacaaagacctttgcaggtacatcagtgagcccacctggataatccagtatcatttccctatctcaaaatccttaattgttctgcaaaatctcttttgctgtgaaaggtaacatagttgcaggttctggtgattaggaagtaaacatctttggtgggtggagggcattatttggcctaccataagaccacgttaatatatgcttcaaagtcattatgttttggagttatgctataaaatcattttcctaactttgaaagaaacaacaaaatgagccatatatgcaaatgggtgtaaccagcaaaagttaccttagaaaaatagataattggttcattgatcttgttaatgctcagatattggtaaattatttatttggaaggaccttcagagcctactaaacattctttggcatgtcattgatgttsctttaaatattttaacttgctcaaaagttatttataaccaatattaatgaattttaaaagaaaccacaagaggccgggtggggtgactcacgcctgtaaatcctagcactttagggggccaaggcgggcggatcacctgaggtccggagtttgagaccagcctgaccaacaagaagacaccctgtctctactaaaaatacaaaattagccaggtgtggtggcgcatgcctgtaatctcagctactcgggaggctgaggcaggagaatcacttgaacccaggagcggaggttgcggtgagccgagatcatgccattgcacactccagcctgagcaacaagagcaaaactctgtcaaaaaaaaaaaaaaaaagaaagaaaggaaggaaggaaggaaggaaagaaagaaaagaaaccacaagaaatatttttcagtatcacccaccaattggcactgaaagtaattaccaaagactcattcagttaactaaattctggtatatttgcatttttaagttgtttgattagctcataagcctattttgtaagcccatgcaaaaaaaaaaactcctctccccaaactaaaaacatggttttgtaaaggccacatatccaactttttacctcccctatataattttttgatatacttgttctctcctaagtacaatgcttgggaaaataagatcatagattaccaatcactcagaaattccagacttcctatataataataaaagcaagtttattaaaagggtgaaaatgtattttgcatcttgttatttgcaatgttactgagaatagctcggtttctgacttttttctttaacccctggaggaagaatatttttaaaatctatatagcaagttgaaatcctctctaaagtactatataagtactatatcattacacaacaacaacaagtattgttcttagttacattttgaaaatccagacaagttataatgcccattaacatatgttcttaatttttactcaaatactgatgaycgctataaagacacatgcacacgtatgattattgcggcactattcacaatagcaaagacttggaaccaacccaaatgtccaacaatgatagactggattaagaaaatgtggcacataatacaccatggaatactatgcagccataaaaaatgatgagttcatgtcctttgtagggacatggatgaaattggaaatcatcattctcagtaaactatcgcaaggacaaaaaaccaaacaccgcatgttctcattcatagatgggaattgaacaatgagaacacatggacacaggaaggggaacatcacactctggggactgttgtggggtgaggggaggggggagggatagcattaggagatatacctaatgctaaatgacgagttaatgggtgcagcacaccagcatggcacatgtatacatatgtaactaacttgcacattgtgcacatgtaccctaaaacttaaagtataataataattaagaaaaaaaagagagaaaaaaatacttatgaccatctggcaatccagattcaagtagagttttaagaagatgaattaatatttttggaacattttgtaaatatacattttgtaaatatttttatatttgtaaatataaaaatagaactaatgaattgtattaaatactatttaaaataaaaacaaaataatataacaaaacaaaagaaataaagcagtgttatataagtaatatggaaaagttttaaatcttcataaagctaagagggaagacattcaagaggaacatgccttcaaatagctccttatatattagtcaaaattatctctcaagaaagaacagtcttctgaacattcatattgaaggaaaaggagcttaaaccctgggaggaaaccaatttcttcataaagcatctctttcagtttgagcaaccagtgacgaaaaagtatattaacgttcatttaaaacctcttctgtctggttcttagttgttcaaagagttgattgacataaggagagatttatgaaaaatgaaacaaactcttctcatgtgttaattaaaagagttcagaaacctaaaatctacaaagcttattttcctcatatatctccttaactctgagaggttgtaatttaagatcacattaaaatagaaaccatttagaagagggatcatgccttctttattctgtataagacacagttaattctgggttctcagaaaataaatgatgataaaacatctccttttaccaattcacaaataatttcaaaggactcagccaaatctgaaaactctctgagagcgtagatttttgccttctacttcttttatatcccttatagcatctctagaattctgctgatagagtgagtgcccaataaggtgagaagacagaagagggaaaggagcgtaggaagtaaaggaagaaaacaaaaggaggagagatgaggaaaggaaggatgagaggaggaaaaggaagatagagctgaatgagtcacctagatctttttaattcccctcgtggaactcactgaaagttttacatctgacattcaactgacattcttctaaaattggtattcctggattactttaatgactcagaaaatattaaatacctatatttctgtcaatgataatgacttgccttttttttctttcatgactttttttttttttttttgatacacagtctcgctctgtcacccaggctggagtgcagtggtgtgatctcggctcactgcaacctctgcttcctgggttcaagtgattctcctgcctcagccttccgagtagctgagactaaacatgtgcgccaccatgcccagctaacttttttgtatttttagtagagacagggtttcaccatgttggccaggatggtctcaatctcttgaccttgtcatccactggcctcccaaagtgctgggattacaggcatgagccaccgtgcccggctgacattttcatataattgtccataggtatttctgagattgcctaggacatataatatgtccaccagagtacctacaaagagtatattcgttttttccttttaaaactttaaaatttacactgatagatatttgctgtttgcttctgaatgataagctcttaatgtcataatgatgatgatatcactttatatttgtatagtacttttttgtttataaaatctccatctgttttctcacttgaccctcataacaaccctgtgaagcaagtaaggtagctggtattaactgtatttcatatgtgaaaaagaccagctgaagttcagagggaactatccaaggtcacactgctatattcgtttattcttctgatcctgagacattttgcttttctctactgatgagtgtatgctgcactgcrttggacaactttatatggagcccaaccttttcttttcactggagtttcccatccactcttatttcttcagttttgtggtttgtcattgtttgtttgttgttgttgttattttgttttgttatttaatgtaatggcacaggcagataaattaaattttgtctttatggcaacaattttatggattgactcagaagctacagaatagatttggagagtacctatcatccacagcttgcatgacttccagtatttaacatttctcaaccaaaaaatttagggtttgacaatcagtctttattaaaaaaaaaaatctagaaggtagtacttgagagtggatggcatctggcaaactaggaagtaaagactttaggcaaatagtcaatgaaatcgagcagacattttgaaaatagaatgtagttatgtcaaacagcatgtgcaatgagaattttccaggccragaaggaagtcagagataactgatacaacaagctagttctacttaaaaaaaaaaaaaaaaagttcttggagtttattttcccttaatatttagcaaactatttagaacatttaaaatctaaaacgattaaggtcttctaggaaaaatggaagcaggctagtgaagtcattttagcatttttgaggtttcctcccaagcattctacaagtaattacattaggaagataggaaatccctgagtagactattagtagtttagtattaaaatatcaaaattaatgagtcattttaacattttggtgcaagcataaggcaaaactcaactttttattgtaccacatacttagaaattagagtgcctcaaaaatcaacagcaatcatatcgcaactccccactaagtgttttctctgtgctttccattaataacatcagactagcccaggagtatatgtggatgtaagagcacactacggtgagttcaaaaggtgtgctttgctgatctttctttatgtctctctactgttcagcataatcacctcttttattagctgatgacttctatccaggccattactccataagctaaatattagcagctatttgaaaaggttcactaatgtaccaaatattcttaaataaaacatgaatttacagttgaaataagaagtttcaactaaacaattaaaacaaatcccaaatccatttggaggatattaagcaaatttgtaagcaaatagggtcatggatattttggagctggttcagagcaggttgattgataaatggggaagacctataaagagaggttaaagcagttggcatttgggcatggttgagggttggtttagttactgtcttaggaaaagcatgataaccggtgggtactcatctacttgagtcaagtatacacaaacacaaacattatttaagctatagcacttaagattttgaatgtcacaagtgagttttaacattgtattatttaaaacttacgtaggttacaaaagagaggtttgggatggctttttctcattgcctttaaaaataaattttaattttcccaaaagacttaagtgtggctctactaaagcgtaaaacaaaagatatttttacaaattaacttttaactctgtgattctatatcaaaaaccaatcaatacctgtgatgtccaatagggtagccactaacctcatgtacctatttaactttaattaaaattaaaagcacggttcctcaatgacactaaaaaccattctaaatagacacgtgtggctactggacactgcactggacaatccagatatagaacagccccatggctggccaaagttctgtcagacaacactgacctatccaaacatattccaaatccttcataaatgcattaagatatttgtgccctgtatttcaaacactttgataggtaaataaaattaatttttttctaaaaaacaatcttgtaataatcatatagaaggtgtattttaatcatcaaaataatctgttttcaaagtttagctaaattaataacaaataagcttgtgctaaagcaccagttggatggtttacaagggaagtcagacattcatttattgcatttttacacttagcagcttcactttaaagcattctgctctacataatggtgctctgttaaacaatgtttaaagttaagaaacatttgaagtcgagttctaaagcaatctgcatatgctatcatttaatttataaacttttgaagcacttttaaaaaccctcttaattataaaattaatgaaatatttaaatagctcaccagttaaaaatttaggccctgttgtgaattaaggaattaatcttgaactatatttatacattatgtgtatataatatattcacacccacacaaaaaatatataaatacataaattaatactgaagtgccccaaaggagtgattttacatattgtatataataattttatatatttttatgaagataaatatctgattttgcatattttcatgaagatattatgtagatcaatatatttgtttatcaccattattatttctccatagagataatgaagctgaggtagaagagataatttaatccagaatatcagaaaagtaccggtcagatgcggtggctcacgcctgtgatcccagcactttgggaggccgaggtgggcagatcacgaggtcaggagtttgagatcatccttaccaacatggtgaaaccccgtctctactaaaaatacaaaaattagccaggtgtggtggcgggagtctgtaatcccagctactcaggtggttgaggaaggagaattgcttgaacccgagaggtggaggttgcagtgagccgagattgcatcgctgcactccagcctgggcaacaakagcgaaactccgtctcaaaaaaataaataaataaataaataacttagctgtgtcacacacagcctctgaacacacattttaccccgtcatacttgacttctgttttcacatgtttgtaaagagtttaaactagatgacttcaaaagtaacctttacttaataaagttgtattattccaggtataaataaaaccctctgatttatataaattgatatatatgtctatatataacaatacatttgtctaggtcctttcctagtaaaactgttcaacatcaaatgaggtagaaattcacaggttttaaatttttcagtaacagagaagggaaaaaatgcaagaagtcaagtggtttgcagatgatagaaaaaatcagtgtcagatctaagaatatcattcttcgtcttcacttctggctacattatccctttctactatacattgtgcttatcactaatgtattgaattaacatgagctcacttcaaagattttcaagaaaatttatcattttcctgataattaaaaaggaatactgccaagtaatgtcactaaaagactgacagggactacttaggacctttaagaggacataatgtaacagcacttttgcagaagtcaggttattagaacttaagtgttggaggtttgaaatacgcccatcaacctggtaacaaaactgtcagaattaacaaattgaaatacgcactttgagtagactaggaccttagtttccgctcaaagataatgtaattcttgtgttaaagatctaagaaatgagtgtgaattactctgttcttagagttctgcaatgtcacaagatcataaaatcctgaatcaagaaggacagatcagaggtcattttgagcagcctcttttattgggmcacaaaacatgcttatccccatgcaataatggcattctaattccagtctttatcaatagtaacaataactttagcaattactttttaatctcagaattctagaaatctgagttctaacaaaaacacggtgtatataaaatggtttatggccatgcataatttgtctgccttcttttccagtaaaatgaggtaggtcatgtacatttcatattttagctcatgaaatcttcaccattttcccacaaggtttgtttccactttatatgtgagaacctgaggcctagaaaaaatatacaacttgcccatggacacacaactagcaactggttatcagccaagatttaagtcctctactttgactccagaactgacattttttatattgtgcttcattgctttttttttgtttgtttccagaacaagggttacctatgcagaggtaactgacatatgaaaactatccttagaaagaaatcaagtaaagtaaatttgcctactttcctcaatagcccatttcgcctccaataaaatcatatttaacgggttgatttccaaagtatgagtttgttttacaaaatttaagaggaggaaaaaaagaatatgggtgggatttgtggaggtmctgctatagttaatgagaagatatcacaaatcaggtaaaaatactctctacagatttcttttatgtttgcctcacatactgccaggtattaagcatcagacagatgttattgatgtaatttctacagttacaatttttcacttgaaattcaaaggtagttaacagaacattattcaaattgaatctgtatcatgtttaaggcttctagcttcattatataatatcctgtgtaaaagaagccaaataataaaatgtctttgatgtcaacaaaagcaattttcctttttttatgtgttctcagttcaattagctcccctatcagaccacactgaatccttggctctcagttactaacatacaagcttttcagctgtatattaaaacaactaaggttttggtactgcataatgacattttctatttaattttcagcacaccatggaatctgaagtgattcagaatggctggcttttgaaattcctttgaactaaataaagcaccttcatttttacttgaattattttacagtacttttaccaatgcctaaaggaacaaagataacagctatttttttccaggaggattttggaaactcgaaattcttaaaagaactattttaacaaaaataaattgaaggaaaccgactgattttaattttagagatyattgctttcaaatatatgatcttcaagtcctcttgaattttgagctattttgaaatcaagttctatttgtataaggctttctctctgaggcaaagtgttatgtgagggtgctttccagcattcaaaagcattatatctcaggtcttaaccatatttccacatgtgcacatcttccatcaaactgtggctcatagcacagttatgcaacacaaatctcgatgcttctctcccatcaatttttgaggaaatttttgaagagttccccaaatcagattattatctatgtatcaatacttggtcagaaaaaattcacctgaaaaccattactgtatactgtaccaatacacgatgtaaataaaagttgagtgcagtagacatagttcacttctactacttataacacacatagtgcctaatatgtgccgagcactgttctaactacatattgtaactcatttaatcctcacaacaaccctatgaagttagtactattattttccccattttaaagagaagaatactgaggtacagacagatcctaaatggtggaactcagattcaaacccaagtagcccacttctagaatctgcataagtaacttttactgtatagtgtttctttttgttttttttggacgaagtctcactctgtcgcccaggctggagtgcagtggtgcgatctcagctcaccgcaacctctgcctcccgggttcaagcaattctgcctcactcagcctccctaatagctgggattacaggcttgcgctaccacacctagctaatttttgtatttttaatagagaccaggtttccccatgttggccagsctggtctcaaatgccttacctcaagagatccgcctgcctcggccttccaacgtgctgagactacaggcgtgagccaccgcgcccggcctatactgcttcttaaaaggaaaaataagctgacacattgttagaactgcagccaaaccagtgcttttaattacctaactagtgccaatggactagtttcctatcctttaccatcctgtactatcctttgcctggttgccagggcaaccgggatcactttctttaaccacactggagcttattctgtgtaatcatttgccaagcaatcatttgccaagcaatmatttattcagtcattcaacaagcacaaatcaagtgccttttatgtgcctcacacttgtaagtgatgaggatacaatgcccaataaaatgttctggttgccctcaagaagctgatattccttcttgcaatacttctatgttggtttatgatctatcacatcttctagtgtccagtgcctatactctctagtgtcttaggctctccctttctggttcctgggtattgtcatcatttcaatctcctaccctccattaacacatttatattatcctttccactccttcaatgccatcatccaaattcaggtctttactaataacctacaaataaattacaagaatggccgtgtgttctgttctccttacacctaatctttctcaaacgaacttatttaaccacatcaccaccctcctactcagatgcaaaaactgactctctagtggctgtataataagtaaatctctttcatgtaatattaaatactgtttacaatttgacccccaacctaccatatcagtcttgcctcctaccatttgcttcagatgcactccagtctaataaaatatatctatttgcagttccctgcttaccatttgatcatgttgacatatctcttggcaatgctatttcttctggccttcttactgcctgaaatatgcccacctatgtctatactaggaactcttggaaggccccgttcagaartcacttatttcaagaagcccttattgaggtcaccagttagaagtgctcactgtattttatgaatactgatagctccgcatagcccaatctaatattcacctgtattgaattatctgtgcatattacctctgctagactgtcctattccttgctgataccaagtacaagttccttacccatatgaatatatagatatgtatagcatagtgctctgcatatagagtatctatatatatagtcaaattaagtaaaactatgatttaaaaatatgctgcaagtcactagatttcttaagaattgcatataacatcatcatatttactgttgtcaaaatataatgttgagaatgattcagaagggaccaaaactgaagctaaggagtttggaatgactttatatttatatgcgttatttaaagttaagttcctttgaagttgttgctcttgtagatgttggtatttttttttaattttgaagttggggatcagggagaaagtaaagaatataggagaaagtttacttgttttttaatgtgaatcagtaaattctaactcggagaactttttgacacacaattccaaaaaccctatcagaagctttgacaagagaagcagaaatataaggaaaatttaaaaagcccaagaaatgctatcagttcacctccctcagtactcaaaattcaatctttcaatcaaattaggcaatagacctgaaccacatcagctgagtacatcacagaaatgctttcactgtattgagctttaatgttattcttatagcttttatcaacatttgctttaaaaaaaatccrtagctgaagcatgcgtctgcattttacaaagaaactgtccagtacattattctatattccctatttagtagccaacattagaattttaattcaagttatgctttcactttctcctttctgaaaactagaactagacaacttttcttgcttttcttttttgacaaaaacaatgctttaataaaacatggatacagaattagagcaattatgttaacagtatggctactgaatttgcatcttctaacctctttaggcatgaccttatttctattagagatattagaccttagtagagatagtctcaattataattgttttacataatttggggatttattttattttattttatcttattttgagacagagtatctctctattactcaggctggagtacagtggcatgaccatggctcactgcaacctcaacctcctgggctcaagagatcctccaccacacccagctttttttttttgagacagagttttgctcttgttgcccaggctggagtgcagtggcgcgatctcggctcactgcaatctctcccttcagtttcaagcaattctcctgcctcagactcccaagtagcgacacctgtaaccccagcactttggaaggctgaggcgggcaaatcatgaggtcaggagtttgagatcagcctggccaacatggtgaaaccccgtctctactaaaaatacaaaacttagccgggcgtggtggcagctttttaaaaaaatttttggtagagacaaggtctccatgttgcccaggctagtatcaaaatcttaagctcaagtgatcatttcaccctggactcccaaagtactgggagccactgcacctggccaggggttttatttttaagagtatactttttaaaggataaatatcgaggctgtgcccattcatttgtttatttatgcaataaatattatcttttttcaattctagagatacaacagtgagcagagacaaaagtttcttccctcamaacacatataattctaactctgggaaatgaatattaaagtaggataaaagcaaaatatataaaacattggataaaaattgtgaaaaaaaataataatgcataaaagaggaaggaaagggtagttgttttaaataggaggaaatgatacttggttgacaacccaaagggagtgactcattcatctatttgagatgcaggcgatctagtcattaagtacagagaccttgggtgttccggggctacctggagaccaaatggttggagtgaagtgagcaaggaagagaggcatttgactgggtgaggatcttggagtttattataaggactttacatttgactcattaaacaagtagagagatgttcacacatctcaactaatagtaataggtaatttttaaatgatgtttacttgtaagtaatgtgtcagtaagcatcagcaaaaaatgttactttagagatatttaatcatttagtttaatgccatcctttctcttctttcatgtactcagcaaaatcatattcagcagttactatgtggcaacactatgtggcaacaatggaaatctaaaaaaaaaaaagaaaaaagaaaaaaaaaacataattccaaacctcaaagaaatgtctctcaagtggcagagataagtattaattattaaaatttcttttctttagcttttaggtaagggaaactatataagatgtttaggtagaggagtgatcatcatatctgcatttcaggtagattcacatgtagaagagatttgaatgaagtatgactggatgcaaggagatgaattagaaagctgtgaaaaatgatgaaaacctgaactaagacactaacagagggtgaggaactaagtagaaagttacaatccatttttagaatggagtattgacaggactttatgactaaataggtgtaggtggtgtgagaggaggaggaatcaagaataactcccaatttttaacttgaacaaatacatggatggtagttacagtcagtgagttcagcttaggacaatttgagatgtattggtaaattatgattagctgacagttgatattatggaaacccagagaggttgatagatttaaaagaaggtccaggacagaaacccaggaataccaacattcaaacaggaggcagagaaataattgttcattaaggggattaacatgaataaacagaaaaaaattcatgtaagccataggagacgagagattttacatctaataatattgttgactgtgtccacctgtagtggcaaacttgatgtgattatttatttcgatttaatagtactgtttatatgagtattgtagagcaagcatttcagagcaagttattatatttataaagattatctgaaattcagttggataatcctcctgaatwtaaaatatattgtattattttattgttgttgttgattagccattctaaaaaaatctgtcctcctaaaataaaaatgcattgtaaaattatttccttcagtccttcaaatgtagtcacttcaatgtgcttttaatattttagtttacttaagtcactatatgtcaattaatatcatttatgaggaaagaaatagcagtgctacaaagaaacaaaaatacgtactataagaagatgaaaatatatgtccattaattagaaaatcctaggctactgtgtgagctcaggaaaaggacaactcatttatgaaaatgaggttgatatatattctgatatcatggaaatttcaatggattataaaatcagtggaagctcaatgctttgaagaatacattaaatgtgcataatagcagctagtatatttttgttatctggtctttcaaccaagtacttgtcaaccaagaattgcttacaaaattttcctatcaattcctaaggtgaaacaattaacagggttaacwgtccaaaatcattagtcaggtcattggcagaaccaggagttcaatatgagatattttttaaatgtctctctttatattgtctgatacttaaaatctttaaaagtaaatgcataaaatgaaaacatcaatatgtctttatatattatgttataataatacatacaaatttagtagaaaggaacaaattaactataaaatccagataacttgtagcatatrtaaaaaatagtcttttgagaagattcatgatagatattaatttttcaggcataatcaagaattggaatccaaacagtagaaaattcgtgttagaaaggacttgaggttgctatatcagcagatatgttctcctttatttttacagtttctacctgtcatttgctctataataatacatgaacaaatgcctcacactgagattactatgaaaccataagctatactgttaccatacttaacattataaccaaaattacaacttcacaaactgtaactcgaggaaaattacaggttataccaagtgtagcagatgtatagaactgtagcagctgttagaaatcctgaatattataccttatgaaattatatttccagttaacataaatgctaaaataagttatttattctaagaagttttttctggagacaaacatttccctgtgcagcagaaaaagcctagtattagaaaagcctgctcttacaagtacattcgaatgttcagaaattcaaatgaagcatatgttgtcaattaatccaagtatataataatttttaaattatgcctctatttacctatgggtgatgcataataatttattaggagagttgttgatactttttttgtttaaaaaataattattagataactagctcagcatcatagagaactaatatctagaggttagaggtgaaaattagtaaagggaccagaaaaattaaaaatcatgacagaacaccagcattatgtaaacagttaagtaaatcaggattaagaaccatcccaaaaatgcacctgcaaaatcgaaacaagcaagtagattgtttagatctacttgcttagtccactgcttcagaaatcagcactgctttgtttaaaagataattattgattgctatgttatataataatcttccaagacmgttacagattaatctgaatacctatgacctcaatctgaatttctatgtcttagaagttttggagatagccaacccaccaatctgtcataaagcatattagctgtctgggggttaccagttcctcaggaatgtcaccctgtcctgtcctctccatgtgctgatcatgaggagggttagtgacactccacacccattcatctctctcttttttttggtagtgtaatgagtacagcaatcattctagcagtatttgctatgacaacatcattcagccccaacttatgccaaaaatgtgcatgttaagtgaagggaaacaagctctaatggtgccctttaatgttctgaagacacaggtgttctctgtgaacttgacatttgctcggtctacatstgatcctaagggttccagataagatgaattactgtgtgaaagtcctcaggcattttctcacagataaatagcatgaaattttgtgatggagagagaacaacctcagtagtaactaggtaaagattgtactggttccccagttgataatgggagccactgcacaaaggtcaaacaatttggatgcaaagtatccaatttgtcatcacaaattggatttgagagtgccatgaaaatgatgagccagcacactgcttctaccccatggtgacatttactctctcttacccactctcccttagttcttatggattcttctgaaaatataagatggaatttttttctagatggattagagaaaatatgtgtctatattttttaaacagtatacaatggtgacattattaagatgatgacactgatggtgatgcaaattaaaacccctgagaatcttcactagatgcagtaataaaaaggttaaccaagatgtcaggaaaaaatgcatcctgaaatatcagcgtaaaagcagaatccattctctgtggtatttttaaaattataccacatgatgttaaattataagcacacatcagttcaacctagcaaactttcattgaacaactatgacatacaccaaagagacaaagataaaaaagaccttgactgacccttcaaggagcttgcaatcctttttaagtggcaaacatttatgccactaataaggtgatataagcattttatacttttttttagatttagaaatattacagtaggagaaaaagcagatctttttacacacacaaagaaaacacttagaattgtactgataataagattagtgttatttggtccatagagatgccaaggtatgtcagttgtctcactgagaactagggaattcagccaaaaatggttcctgatcatgttctkccagagcaaatagtactgaagaaaatcaaacttgtcagaatagattttctgagatgtgatgagctagtgttagaatgtgaaccaactagtgcttgaatgttgaactatgcttccagccttatggagagttaaggctccccaagctgcccaaggggccttcgtgatacctgttttgttactataaataatagaggttacttagtgaatgccaaaagtgatctaaacattcattagtattaactgtatacctatgttgcaaatatcaccagaaaagatattggaaaggtaatcaccatcaattcttatattcctaaagctttcttccagtcctctttttctcctttcatgaaatagttttcagacgcagtttggaaaacaagtatagtaattgactggctcataaaagcaatggaaattaaattccagctgtattgtcattttcaaactcatgtttttggctacctcatacctctaaagcattaaaattggcatgtgtctattaatacattcatcaattctttcattcaactcaataaaattgagttcttaccatgagctaggccttgatgactcatagataaataagataatattctatcctccagttttgcttagaattcagtaaggaaagaatgacaataaagtgctgtagctgatatattgtattcaggttaagataggaaataaggctgtaatgattcattctccccctgtgggattgggatcacattcataaaagcaattgtactggggtatcaaaaagtttgtgaggttgaaacagaaggacacattgggcatatatagtagtttgataaaattgaagtaaccttaaagtacgtgtgaagggataggagacgtgagcagagctgaggctgagagacaaaaaaaggcctatgtggtaaattcagaatttagactttttaataaacaggagaaaactatgaaagaagaggatttttggacagaaattctaaaatgtgttttatgtatacattaaaaagaacaaacctggatgttagagggctaatttgagggtaatttcaatagtgcaggggatgagcaatggaagcctgaacccaaatgggcatctctgtgatagagaatcatagaggaatgacatttgagaggcaggacagacagagctgactatcagttggatgtgagacatgaataaaaaacatgatttgactcccaagtttctggtttggataagcagttgaataattatatcattgggaaataacaagagtatcacattatttgagttttccatgtcttctaagcatgtagatttttagatctggagctcaggagagagatttggagtcatatatgtataagacatagagtgtggcagtggatcaaatagtgtgggcaagaacatataaggtaagaaaagggcttgatgaaaacacagtactgtcagaagctaggaggagaaaggaagtcatggaagagaaggaacggaggaaaagtcaagtagggtgaggaaaggtaagagtggggaaactattagaggaaaaaaaagaggtggtcagcaagtttgattgtcatagaaaaagaaggaagagtaggactgaaaatgtttgctggattcagaacaaagaagtccatggtgtcagttgtcaatgattagatagtcaacgagagttaatttagttccaatggaaatgtgaggaataggaggtagttaaagggcaatagaccagagggtttaactatatttcctgtaacaaatttgaatatattcgaacgctataaaagaggagccaaataagtgaaaactgagcagctaggtctccatacctgaggaatcagcaaccggtggaatagtacaaaagcaaagtggaagaagtagtgttaaataggaggaagcaagtcaggaaatacagatataaattacctgcaggtgtgagggctagctcttgggagatttcatgcctcaaggctcactttctttctttttttttttttttttctgtgcaataagatctgggtccayttccaacttttctccctatagctcacatacttgaagtgtgccaagaacaccagatatggcaacatcccacagatgatgaatggtatgaaaatggcctgagggttctacatcattcatatattctctgatcactagagatttattctcctatgttctctagcaaaatgattacagaaccacagcaataatagtggtctgctcaattagccaaaacatgctactgaaaccctttatttgttccacagaaagaaatgatctaaaaaaatattttctgagggagtaggttttcctcctaagctgcatgtcatttagctcttccaatttcttctagtatagggtttatttcaatgatttctctgcctaatgtgatgctgtaacactctgaatctcacatctttcctcagtcattgatgtgctgatcgttcagtctgccagatcattaacaatgatttttttttaaagaacagttaacaccaattcttgcagtaatgcctaccctttaatctcccactgctcctaaaaaggaatcatccatctttatatgtcttttcatctatcattggtatttgtgctttgttctttgacagtttcagtcaatctgattaggttttatgcacagcaactcaatagcacaggataattatgatacagtgaggactacttttttttctgtttacttctatatgcccaacattctgttctgtaggcaatctgacaattggagaattttaatgcaaaaataatctctttaaaaaaactttcaaaaatttcaacctctattttagattcagggggtacatggacaggtttgttacattgatacactgtgtgatgctgaggtttggggacacaaatgatcccatcacccaggtagtaaacatagtaccaaataggtagtttttcagcccttccctcctccctctttccccccaactagtcgccagtgtctattgttcccatttttatgttcacatgtaccccatggctagctctcacttataagtgagaacatgtaatattaaagaaaaaatatggctgcaacatagtaggcaaaattcattttcaaggagatcagaaatccaattgattatagcctaatccaaataatttattatttaacaatttaacgagggggaaggggatatttccaaaacgtttaaagtttatttctcataggattttaaaattacctggcactataatatggaaatagagagtagcattaacttgtcaaaaattaataaaaacttgcttttaagaagaggacaaagggagtcaaaatggattgtctaaaatttaaatgcaatgttagaaagatcacttttgatgctatctggaaagtttcccagattccccattgagctaatctctgtgagtgctcattataagaagtgatagctatccctctgtctcagagacaggatttgtcttattctgattgacacagctcatgttatattaagtttgtgaaatgaayacaaaagctaagataacttttgtttttaatgacttgcacctttttttaaaagaactcttagggatgttataaggataaagtaacataatagatattttgctcagcaaaaagcatgattcagcctagcacagtggaaagatcatggtctttggagccaagaaaaaactgaatccaaatctaagtaacctcagctctgccactttctagctttatgacctcagataagtttcttaccttcttagcgcctctatttccccctgggaaaaacggggataaccagaagctgtgaaaagtaaataagatttgatatttaaaaccttgcctaatgctgaccacatctaggagacgctcaataaatgttaatccccccaggttcccaatagcatagcttttgaacaagtttatagatgccaaatatgaaagaaataaatacatattaaagactaccagatacgtgatgctacctagttaatgcttacatacagtaaatgctgaagcatacaacaaaatacaaaatgttttgtatttctttcccagacttgtagtggtattcttagttcttgagattactctaccaacatttattaaatacctgttttgtgacagtagagtataaacacagataagaaaccatctttgttcccaaggagtccatgatatactttaaagaaccacaggagattgaaattggcagaaaccctggaggtcaccaaatacctccattttttaaaaaaaatttattcattttatttttgttggtttttttgttgttgttgtttgttgttgttgttgttgttttacaaacccttgtgttgcgagggctgactttcaatagatcgcggcgagggaactgttctgctacgtaggaaaccccgacccagaagcagatagtctacgaatggtttagcgccaggttccccacgaacttccattgcgtgacgggcaagggggcagctgcctttgcggccagaccccgtttcccaggactaggggcactccgcactggaccctagtcctggcgcgggatggggcggcccccaggcggggatagcgggggaccgacatccgagaccagccaaggcccccctctgttttttttaaagaggagaaaccgaactggagaaagtttcaatgaattactctataccacattgctagttagtggcagctccagtgaagccttcctgactcctaacacagtgacttttcctttaacctggtcccccaaataataagctgtaaaaagatttactggaagaaaaatgcacaagaacttctcgagtaggtcagatttctttttttctctcttaagtataaccacatcatgtttgatccattgaatttctgtaatggtagtgtatcattacataaaataaaagtgaaaaagaaatacaacaaatttcagactgccttatgaaatacaatagctaagcttaaatattcacagggctaatcccagaaaaggcagtctggactcggttatccacataactacctctattatccatttcatattagaatgtagaattataacatagttaatggggtttcaatttaaagaccccgtgtcatcttattagcctatcatctgccctattttctccttaatttaccttatgtttatacaattcttatctcagggccacgttgctaccataaatcaaatatgccaggtttcaagtttcagcatatgagcacagatgtgagcraacagcttttgatcactcagttatctctaccagagtaactgaaacagggattctcaacacatagaacttctaatccaggctgacctcaattaactgcaagctaacagacattgccacgatatcttcctagaagaacaagaggattcctggaaagaaaaggaatctatccgtctttcatcccactggtcaatacctttttctcagaatcaattattgacattttataatctatgatcttcaccaccgtaataagacttcaggaaaaaaaaatgtaatttcagcagaaaagattggaagcatggtactagggatactatacattggcacaggagaagataaatgtattgactcagcattttgttaccattatccttctctctaaaatctagttctgaataaataaaagcagggactcagagcctggcaggatatcttgccctgaatgcatggcccataatcgaagctttcaacaggactttttgggtgagtagataggaattaagggtccaaagaaaayttgggcactgccttccttttacattgatgacttaaagaagaagaggtacaktagtaggtaaagaagaaataattaccaatttagaaagagggtacagagggtagaaaagraatagtctaatgtttgcaatatgtttggaacatatattcagggtccaggagcactgcctgtatctgattccttgcttctgcttatccagagatgagtttagacagaggacaatgaagacagtactcagacagtacacttatcttctcccatcccaatatatagaatctctagtacaatgcttcaatccttcctgctgaaattgttttaacattttttctggagccttatgggagtggtggagtctctagatgtgtaaaatgccaataaagaatgcttactgggaaaggtattgactagtgagattaaagacaaatatgctcctcttctttccagaaattccctgtgcccctaggaggagactgtgtctgttaaataatgttaactccagaaggaaagatcaaaaacaagagagaacaatgaaaggatagtgctaagtgtgaaagaaaaacattaaggaaaggagtcggagggaaagtaagagtgttactkcattatatttaaaccagcctgtcacaaggagaaaagaggcagaaacatgtgtgcttcttgtctgaccacttatctaccaaatccagttcttctacctttaccttcatcgtttcaggctctcgtataggcaataaatggtgtcaaagattcagcaagttgctactatatatttatgaaataaattcacatatatttatgaaataaatacccatcagctttcacatactaaaataattagtgtaaaagctattacattaaattaaattaaattaagatttcattttctagcattaacaggtggctttccccttattccttattccatggtaacatacccttctaaaaataaaagtttcaaccagttttcctgctcttagttcaatgtcatcctaaaaacaaaaaaacaaaacaaaagtggccctaacacctactgggtgttaaaagataatcttggattagcagataagctttctgaagtgggaaagtgagattgagcaaggggaatattaaattgtcaagaacagtaccatgtgttctttctaagaatgaaaaacttagaaatttgctatcagaagtgaccacctctctaaatagtctagaacaaaaaataaaataatttattttgtaaaaagaaacatcttcccttcacggtcttcctccctttcctacctctgttcatcccctgccatgttcatgaggtacaaacaaaaataacagtaggattaacctggaagaccctactcatgaaaaatcatttatataaacgaggaagaaaattctgcccactttctagcatatcaaggaatattgttaaacgtatttaaaagccagtctgtgattttgcatggctttattaataatgttcttgagaaaacaaagccagtacatagataaattccttacatgatgatcaacaccaaggaaacctcttactgttctcagacctaacataaagaatgatgattttcattcactgtsaggtacaaaagcaataatatatgcaaaataggaatacaggaaatattgcacagctcactaatatactgcaagttactaatgggaaaaatatcaaaataccttaaggactattatatacattatcacaacactcaaagaatgaaaatcacttattcctttgaaaattgggatactttttattttgagagctgcagaaaaccctatgacgcactacatagctctcacagtaaatttccaggatcaaagttcaaaaacaggtacatgataaaatgagcaaagtgaggtagacaacagaaaatgccaaaatgacaataactgaaaatattaatttccaagtattatatctcataacataatagtaacatgatgtctcaccgttcccagctcatcacatgttctaaagctgttctcctcctttttataaaactttattatcctgctgaagtttcactcatacaactagtcattccttaattttatacttagttattccttagttattcttagttattccttaattttattttcttttaacatagttattttatagcaaaaatttatgatgataactggttttttttttttgtactcttcttatcttaaaaacaccagttagaaaaaaatgacatttataacttgtggtctatggaacaagatcagtaattattccatgcaggataatgttagtatactaagtgagacagcatcatttagaggaaaagaggacaagaaaagatgatgatggtagaaacaggaggcagggtcagttatttccatattgatcatgtagaccgtgcctgataaggtaagaggtctattattaatcaaccaattcaaccaatgatgaaggctcaacagaaccccaatgtcagggaaaaagcattaaatttcaaatcccattatccaataagcagttatttatgaactacatacaaaatgtaaactgaatttctaagccacatacaactatcagtataattattctataatctaaatatatccttgactctaagaatatacatatttcctactacaaaaatttactcacccagtttactgataattaattccaccaaggttgagatgataaaacttcaagggtttatttcacaaggttgctttgtgtttaacttgaacaaaaaagggaaaataaacaacaaaactaaaacaaccattgaaccaacacacctgaattttcaggggtagaattttaggaagaaaacagtccctgacaagtacaaattctctacatagaaaactgcctattcggcctcagtctatacacaaaaattactactgcacagattctgtgtagtagcacaaatagaacaaaggtcaaagattaaatgtaggtatgtgcatgtgttttatatatattacaaatatagtaatatatacacacacattttgtattagcctatgttattctaagcattagtcttagcatatgctgtgtttcacatttagaaatccctaaatgtgttcagaactgagggatgtattattcataacttatctttaaatktattatttaatgcagtatccatttgtaagttagtagatgctgatctcaccaattcattgactgtggctaggcatgcacaaatttcacataaagatataaagctaatatacatttccttcctctgatttccattgcccggatttcttgcactaaacttttmtgctgtgttgcacatagtgcatgcagaatgcatgtagaacatgccctgaagaatctgcaatgcagataagaggaaagcattattccyaatttgcatatcacaccacacacagtaactgatttgtcaaatatcaaacaatttacatattctaggcctcctgctctccctttcttgagcgttcggtctactttttctttttgcaactgaattttatagagaggaaaatatatctttagctaaggtgatgtaatttgaaaatataagtattagatttctccaaatgacttaagaatattagaaaagaaaaaaaaagtacccattcagcttagattgcagaacagacagggagcttaaacagcaggctctgactgaaaattaaatttaagcttccagttactgcagcaaaacctaagaccaccttccctctgtagctcgagtgggagacattgttctgctgtctctctaggctctttggtacgctgaggstgatgtgattgcccagactcgtgtcctgcatggaatttaaactacttttgtaacagcaaaaggaatttactgacttcctctcagattgaaagcagaaatgaccactcgcatcaaattatttacttcgatttgtagcttatttaaaatgaggtaggttgtgattgatgttgatttttattcaatggctcatctattctgatatttcagtttcttaaaatatttatgcaaagttttgtttggattacttacatacgtagcacaaatkattctttatttgccatggtgacagcacaaatcacattatttgcagaggttggggagtcccacaaatcagcccccacaacaacaaatatttatttattgaactcttggaacagttacaaagaaatataagasacagtttctgttttcaagaaccttacaatatgggaagataaaatatttacagatacaaattaaccaataaaataaagacagagatacaagcaatgccacaaagccaaaatcatagtggagattctgccctggcaggaatgagatctcattacctgggtgatttattattcctctagttctcagtctgtctctgaaaaatgaagacgtgaactaaattttctcccaattcaacagccttaaaatttaatatgaattctcttacacctaaccttaaatgtcttcacaattgtactctatgtcttatctatggaaagggaagttagtagccaccaaaagatatttcaattgatctattttcccttggacattttaacagctaataagccaagaaatgctatctaatttccttacacatcttttttcttttttcttttttcttttttttttttggkgacggagtctcaccctgtcaccgaggctggagtgcagtggtgcaatctcggctcactgcaacctccgccttccaggttcaagcgattctcctgcctcratcaggagatggtctcgatcttttgacctcatgacctgagatggtcttgatcttttgacctcatgatctgtccacctcagcctcccaaagtgtwgggattacaggcgtgagccactgcactcrgcccacacatctttatacaagaggagtgaagttatacacattgtagtctatcctacaatttttttttttttgagatggagtctcactctctctcccaggctggagtgcagtggcaccatctcrgctcactgcaacctctgcctcaggggttcaagtgattctcctgcctcagccacccaaatagctgggactacaggcatgccccactacagccagctaatttttgtagttttagtagagatgcagtttcaccatgttggccaggctggtctcaaactcctgacctcaggtgacccgcccacctcagcctcccaaagtgctgggattacaggcgtgagccaccacgcctggcctaacctacaaatttttaaatgggattttgtttggaggggtcgttgagagtctatttttcagataaagaaaccaccttacctagttacaagcattgagttttctttccctgctaggtcctctaccttatctgtggtaccagccaaaaagtcaattatttttaactccgagaaaattctgactgcaaagcactgcctcttcctactcagtacagatgatcaaggtgggataacacagaagaatcttcacacccactcatcactctctctctctctctctctctctctctctctctytctctcattaaaagcactaagcggccaatgccttactgtctattccatgggcttcactaggctgtcccttcttaggcctagaacgaaatgggcttcacaaatagaaattattctaatccaaataatatttccccaagtctcacagtgcaaaacaccacagcagagagcacatggtgatcaakaaagacagcattatcataaayatttgtatttcttatgctaacagatcccattcttccagtctgtggcattgtcccaaactgccccatcaaaggttctaaaatatgcttagggcatctctattaagaggatgaggagaaaggaggagggggaagatgctaacaactaaatggtaagtttttacataatggtacatcctgccagccaacaagttttactacaaaaacaaacaaacaaagaaacaaacaaagtttacaaatcctttctcttttttttaagttttattgattctgctgaatgaaaacaaaaaacaaaaaataaatgtttatattagtcctaaatgtaagtttcgtaaattctaaatgtaatacagctgaagcaataatagtactcatttggctcacctaaagtgccaaaccatttacctcaaagtatgttcattgtacttacactgactatgtgtttcagttgtaaagaaaaataacattaaagagcaggtatagaaatttagtctataacacatacaaaagctagagctataccatcccctaaaacatgaagaactttgtaatactgctttgtaatggtaatataattactttatcatagtattctgttttctgggaaccaatcatcttttagaatattaaggtttggtcaaccttcacacaattaactttagtacaagcatgagaaaataaggctacctacacactaggatgcagtgttttccaaatacgctaatcttagaacactatacaaatacaaatacaaatttgcaggacattactggaaaaatmtgattccattgatctgaggtgagatagaagaagttggaatttttttaagagtatctctagtaattcttattttctggcagacttgaagaacatttttataatgtactcaaaaccaaatactaagaattttagattatatttgccaggctgcccatcagtcagtatctatatgcatatcatttgaagaagcttgaaatagagttagcattaaaaatagttcctccattatctatcacacaaacagcataaattcttttgttttcatctgaagcactttttgctctttgaggatccttttctaaactgtaaatttcctggaaatgctaccagtcaatatctttgaggaactaaataatagtccttgaagagcaaaaacaaatgaaaaaataaatggtggtaagcaatggagaaaaggagtatgaaacgaattctgctaaaggaattgcaagatggaattgactcattttcccattgagattaatcttttgaagccaaaacaaaatccgaggaccacagatgtaaatgagcatgacttgtatatctatgacttgtgctagaaagggctatattgtcatgattacctcccaaatggtcaatgagactctggctaaccttccctaatgaccttatgtcatccatatatcttaggaaaagtaactccctcccctacacgatatctctaaaagagcccactgaccagtttccttaattctgtccatctttgcagattacagacacttagtatttaccgtttcaaaagtaagcagcttagtatccatcgctcctttataattccacatattcacgtaagaaggcaatgataattcaggaggtacttcaagatcagtcagtgcctcctggttattaaaaaaaaaactttataaataaaaaggctgtaccccaataatataaatttgtcaacaatgtggagatataaaaatttaccccagaacatcaggaagaaacatgtagaataaaagtactgaaatgtaacaaaagcagagatgtgacctataggttcctttaagggtaagcttttgtgtcacacaaagctaagtgaccaatgaggacagcaggatcacaccattgatccaccaagtcaatctgagcttcttcaatctctggcctaatgcttcattatagcatgaagttcccccaaaatacactaatatgggttcaacaatggcgactttttaaagtaaaygcttggctattaatgccttattggttccctaatagaaaagggcaatgctcatatgattcctttcttaccactcttccttccaggttcaatatgatgcagtatttccaatggcgggagacagaaacaatgtcacaaagtgggagaggcactaagaatgagatctggcaccacttactcttgtttctatacaatcraagtacaacacttctcaattttctaggygtctttggggagagatcttatctctcttaatggtaccaactcagtaacccaaactgttcaccaatacttcttttaagtagttgtgaggtagggagtccaacacttcccaagagatcctgttagtacattatagcaactayagggaatgttttacaaatgactgtcattataatgttaaatctaacatatatgccarcccccttagtttatacaataactttcctccaaaaatcttaattaaaaataaaatatagctgacttcgttataaagagactcattaaccaggacattgcagtttttattttatcaaatagaaatagtgaaaatgaaagatgacatattttagagtcagcacatcctgggtccaaattccacctctcctgcttcctacctacgcatctttgagacagctgcataggctctttgcatctcaactttccacataaaatgtggcaccccacatggaacataagtttgttttttatcccttccataggtgtcaccattagtacaagtattaaaacttctcataatttcccattgagttttcatattattggaacaaactcattaagcaaagattttatgaggctagagtaaaaagagagcagtcaaactatagacacagaaagcagtcatggacagagattcacaacagaactttacacagttcctgtccaaagggataattaacaaagcaaataggtaggtgttgttttaaccaaacagactaagataatgaaaaaggaaaactgcagctctggaaaggagacaatgccatttgcaggctagaaagttatggaaaattttctaagcaataaaaacttaacatgacccaaaatataatcaacacaatattttgaaggcagacaatgcttcagaaaagatgaataggatatcacttaccatgggctttgttctttgtaagaatttcctggtatttttgtgggagtaaggcttgggaatttcagacctcagagctaacagtgggcagaggatgaaagatgtacctcaaaggttcttaaaagcmataakgatatcaggggtgtcttaaatttccccaacaacctccatatccctaatgataagttgccactgtaaatggctgttgtrtaatccatcatgaatatagatttagttattgactgggaattctggtcaaggaggaatattttcaggttttatttacactgatgataatgtgtttcctcatgagcataatactgtactcttgcctcacctcttatgttcttttgccacatgtaatatatgtatattatattgttgaggtggagatgaagaatgcttgtaaagtattggaaagaacaatgtcacgtttttatgtcctctgagaaaataaaagggtagtctacctacagcctgaaatacatactgtcgcccattcatggaatttatatcacataagagttgattaactgagctttaataaaatatggttggtatacaagttctaattcaagaactggagtgcctgtggacccactaggatgtgtttaaggaaaatatgtttgggaattcctttggtttgggtgaggcaatatttctctggcttgcagttacttctatgcataattggtcattgttagtcttcccaatgtaggactggattacaggaatgctcgtactacccatttttgcatctaattttatgttcacaattttgcattatttttcttcatgagggtctctcaaattgtataagcttcaggcttgtgaaaccaagatccactcctgatctgtatctgtaaacactgtacttcttaagcatcaaaggacaggtttgaataccatcaaaggacactcacaaactttctaaaatatccacattcctaaggataacaataagggcattccaaattaagtggcgacagaaaaataaacacaaacccaacagtcctccacccacaaaattacattatacagtaactttcaatcactatgatctcaagagctataattaaaatagcaagttcaagtactttatatgacaactatgatatgaataaatctgctagagcaggatgaaacaaaagacaaagtgtgtcatttacttgtataacctgcatcacctcaggaaggtgcatatgaggttacatcaatatcaagtgagagagcaaggattatgtggtggcctgagtgaatytgctcatgctcctgggtgcaaaagagtgggaactgactgagactgattatctttattccttcttgacagcttaattaagttctctaattagtcacagtcattaagcactacatcagcaattctgcctcctcttggattggcttcttctctagtctaattggttagaaaagttagctgatctaaaacattgtctttcaattttgggaaatcttctttttcacttttattgagatataattgacaaatagaaagagtttatattcaaggcatacaatgtgatgttttgatatacatataaattgtgaaatgattgccacaatcaattaatatatctattatgtcacatactgtgtgtgtgtgctgagaatacttaggttccactttcttagcatatgtcaagtatactctaagttattattaactatagtcaccatgctgtgcatggtcttcagagcttattcataactactagtttgtaccccttgaccaacatctctccatttctctcactctgggacccctgctacctacccttctactctctgcttctgtgtattcaatttcttagattgcacatataagtgggaccatgcagtagttctctttctgtgtctggcttatttcacttagtataatgtcttctaggtttatccatgttgtctcaaatgacaggatatacttcttttttaagactgagaatactgacccagcaacacgaggttggtttacttcaagaagcaccctcaggaaagttgtaagtttgctgaactgggtcctcagccctgtcctgatcaccattttaccaccaccaccacgatgagcttcttcttcactctctctcccactctcactattctctcagctattcatcctttcacactgtctcagtctcttttgccatcccttgaggaaaacaccaccaaagattgaagccaaaatatgagagttcatactctaccccacaaatcagttcttacaaagaagacttcaaagaaggtaatgctctcaaggatatcactttgcagaagtgatttcctataattccagaatgataggcaatcagcaggaaagataagtgattgcgcaaagttccccacatcatagacacacctagaaaagtacagtgtccccaagacctgtcatgtctttcaactaatcttttcttgcatgctggtgtctcttcactattatatccaatgcagtaatatatttaatacctcgaattacagttcctataatcttaggaaattattttgtgatcacatttctaatcacagcatctcatgaaacacccccaaccactacactgcaacaacttacaaaagtattctgggattatgcagataccatatttggtcttagtctatcacatcattcttactagagaactttgttctaggcttttgtcagataacatattgttttatgtattacattggtttcaagagaaattttataattcttattcttttttaaagtccaccacaggtacaatttctggctgtaaatcactactttaaaacaacagcagtaaattagcagtaaacaacatttgaagtaaattacagcattttgaaagaaatatctttggccctttctccactatattcagaactgagtgactggcccatgaactatatccctcctcacaaggtatcattcacatcctccattgccctgcaaggccccttttttttctgtgcgcagaagcccagagagcactttctacaagtttagggaacatgctgatgtagaaacatgaaggataaccacagtatacaagtagtgcaagctatttctctttttgcaagggttacctgttgtgtatctaaggaatcgtgactagacttgtaatgtctgcatcacagagcatctacaaaccagaaaatctgagttctaggctgttttctaatgattcttagacacatatcaatttctaagatcataaaatgaagatacttagtaygactacacctgcctatcttctaggcaggcgtcaaggacattgtaagccataaatcaccaaaaaaaggcaagaaattatttttatcatgactaaaaattttgttttccctcctttagtctttaaattctgctaatgcagccttctaagaaggacatttctcacaaaggattgataaatatctgcacacacaaatgagtccacttagtcttgagaatctaatcctttagtcataattatcttggtctccatgcagtctaatttcagagttctagtaacaaggtaacataacatccactttctaaatgccctcaagttggtcacattataagattaatgagccagatcaccattttccaaaaataaatacatagaaccttgatttgaattagctaaatgaattgacatcatgttagtgatgtcaaaaatggtagagacttctatttcagcagagaaaaagcaaaataatattttaagaccaatgaggtttaagaaaatgaggagtaaataaagaattgaaaacaattaattgcaaaaattggaggggtatttgggcacagacagattgtaagagacactcgatggcaagaatgaatttaggtcgaaggtaatatgaaatttagccatagaaaatttttaataaggatgatatgtcgtcaaagtatatttggtgccatttggaaaatgactgagtcttaaaggatttttaaatgatttcctttttttaaagttgtcatagtcagtttgttctgatcttgagaaagtaaatctgtcttctgatggtcaagtgatggtttccctgaacatccaaacttggtcttcatgaataaggaatcagaatggagaaaaatctgaaaatgcataatgaacttttcagtttagctatgttaatctgtctcaaaattaggagtccatgacttttatttatactaatgtatatttgcatatataatagcatgtatgtctttattttgctattaagtcattttgcaatgaagatatgtaaatattttaggtgccatagggacaccaaaaaatagaagacactgtttctgtttctaagattctacaaatatgttgagggagataaaattagcactaataagaatggcttttttaggtgaggcacgatgataaaaatgtcttttttaggccagacacaatgactcacacctgtaatcccagcactttgggatgccagggcgggtggatcacttgagcctaggatttcgagaccagcctgggcaacatggcgaaaccccatctccacaaaaaaatacataaaattagctgggtgtgatgacatgcgcctgtagtctcagctacttgggaggctgagatgggaggattaattgggcctgggaggtagaggctgcagtgagccgagattgtgccactatactccagcctggtgacagagaccttgtctcaaagaaaagtctttttaaaaaaattctgtaaatgtatacaattaattgccaagtgactaaacagaagacaagcgtatatgaaagtatgttctagtattgaagcactttcatgaaattttaatttatactcaagtacataaaagtaaatgtttccaattgtggcagaaatagccatgctcatcaaatattccagttagttttctaaatatcccagtaactttgcagttaggcagcaccagataacacattctagttcatgggcactagtggaaaggatttgtgtcacttctgggttaaggtagcaaaaatctcatgtgctgttggcagtttctctttctttaccatgggttcctgtctctctctctctctcttcttctaccayggccagtgaggagtctaggcatcattccagatgatgtagctagaaaactgtggtgcctctgtcagcctaggttcctgagtgactatggtccttaaaactaggtgtgtctcccagtacaaatggttgtgtacatatatgacakgaaaaaraaatacatttttgttttaagctatgactttaactagtttttttaaattgtttttgacagtgcagcatagactagcctatsttgactggtagaacaaactaaagctgtgtgaatgaagaaaaaggcatccagaagtgacctgtcaaaataacctcaaagagtcatgggaaccttccttagtgactcaatgaaattttattttaatacacttgaaataaaaattcattaattctattcaatcaataaaaaaaactaaggctaaaaattaacgrtttggggaayagcagaatagtgaaaaataacagagctttgagagagttatcaccttgcttcctctatgatacctggcatattaataactaccaagactcagagaagctgaactgaatgaaagcattttacctttattctccccaactattagcttattgtccttcctttgcctccctaagaagttacatcaggtgcatattgctacaccaatatgtgaactacatgatgacagcactatttacaaaatagaaacgtttggttcatcagcaaagtaatttttagatgtgrtatcagagttcctttattgttaactccccctgtcctgggtttttatttttctctctcctgcttctctccataccatttggctcttcttatctctgttctgcatctttagctggagtggaggctgcacttcccttgtcccttaacakgcatatcaaaaaatgaatataagggccaataggaaggctacctgtgaattgtagcaatgttttagcagaagagaaaggatgttccacagaagtgattccttttacctgtcctcacatctggtcaacataaaagggatgatgaaagagaaacgatatttcagcagttgtgtgcatattctaatatgtatctttgtttctaaatagttgatgcattctagcttaatccttaataagaaaggacagcttcattacaaaacaaattccycattggcagataagcagatgagagggagaatatttaacattactgataaagaatcaagttatgttctagattcatgcagagttttatagaattggtgcaaagtattagaaaatttataagaaagcttatttactgtaaaaaaaacaatcttaggaaatagccacccacacatttttcaacctacttccccaaaaccatagtataacccttagaaagaacattgaagaacagataggaaggggaggtaataatatctttaagaactcactaatatgaaccactttatatatatatacattatctcttaggatcatataacaaagtttgaggcaggtggatgatatttgtatccccattttatagataagaacgttaaaacccacrgagtaaattgtttaaagtcactcaagtactaaaccttactcagtgtgatcaaaagcccatattctttattgtaacttatagcatataagctcctataaggaaaatcacttactaaaaatgtcttctcttctgtacatgccagcagtgctattcctcaaagcaataatctgcatagktttaaaattagtggtgctaaatgtcagcgatgactcatgctttagcattatctcttaagtatgcaggtgataaactttaaaaattaagtacattcattgtatttcaatatttctctagccattctttttggttgaaagtgtgtgtgtgtctgtgtgtctgcgtgtagatatggggcattamggcaggcaaacttagaacacaaaatataaaaattgggtggggaaacatctggatgacctcaatatttacctaacattcttctttgcaaatgttctgaattgtctcatcaattctgcatcatctctgcccccttatacacttttccctgcattgyctggaagctacactcccagaatttcttaccagcatggttccaaatttgattctgctaatgaggtacacttgcaaaagatttggaaggcagatgagaaagaaaaattaattttcctccaacaacagctggaaggcaggtgtcagacctgaagtttgtgtgggcttctgaaaatcaccaacttcagtgcccaggtagccaagatcagcagcaatttcctgcagtttttttagctctctcatatgctgagagttaatcgttttgtttttttttctgatcgttgtcttttaggctttccagtgctatgtaagcacctaatttcctaaagttaattacttctgacttgaaatattaagtgtgatttctattttcctaaccaaaccctgaccgatgcagtatgtccaataagaactcattatcagactaccaggaaaacatattttaacacaggcttacaagaaaaacagttaccaagtatggatgctcaagacagccttaaagcaatgcctagtaagaagtgctttataataactctgatgcaagatcacatgtccaatttttaaaagatgtattagttcacatttgttgcattaaatgattttggggaacaacatagcctgagataggacaaaactgagaatcaaactagataaagctgaatgtgataaaaatatatgcctttaaaaagttaggggtctcaatcaggagttaaattcattaaagaaaaggttatgagtactccaagttccaacagtgaggcagggtcaagagttcactccagctggcacgaacaggcaggtaatagaggacctaccaggtttaaatggggaggttatcactgtcagatatgaagtggctccaatgaaaggttgggaccagtgaatatctgccttagttttagataatgcatatgacatggctttacccactgaccagtgctctttcgagaataaatacttagacacctaatacgtatgaagtcacacagataattggcatgagccaaatgagggttacttgtactctatataaactcttacrtactctcttatcagtagaaatttctattgagaggtggcttggagaagatctctaagttgctgaatcccacaaagactttaaaaaggtagaaaattctaaaaggatgatgctagcaatcaatcaaatactctggcctcctctagaaggaaactgatttgatatgtttatgggtgcatttaccttctgcacacacactcgtcagctaatcaacacaacaaaagtaacacagtcagttggatggaattttagagtcatctccctctatgcacgtgtgctttggcaaaatcaggtacaatatacctgacgcttcagcttttcacttaatagtgcacttatttctagttagcccttgagtcatcttcccagatgtgttagcctatcaacttgtttttttcatgaatatgataactacttatctttcatcttacatcattagaacatttgaattgttaaaattccacatatttcaatatgatggtgtcctgtaatctctgaagtcttgggttactgagtctgctgtgtgtctgaagctacactatgtattagcattcttgttaggtttaatttcattttctacaatgatccatcccttgaagctccacaaaaaatatgcagagcatatttattgctagtactagtgtaaccgaaattaccaaaatctatagaattttcataaatttatgtattttagaataaattattataaaaagaattaaaggatgtttaagttcacaataaattttacatcatctatagacactgaattattagtcagcaagctttctctataacatttataattagaaccaaataattttgactcttccccttagtcatcatttgtgttttaatttctgtccatgtcaataaggttattcacagaaggcaaagaaaaaatattttttaagggtttgttttgctaagttacatggggagtcagaaattcagttaagatgaactgtgtgaggtattaattgaaatttaagtgtataatattcttgagttaggtatggaagatgacagtaatttcaatctcacttttacttcacatacattagatgtggtaacttcttttcagtcagagggacagatgaattctctaggaaatttatatgtamrtatttgcaggtacctttaagctagttctgaggagaaaaaagttatatgaggcaagaagaactttcaataaagaaaatgcatgtaactgcccagaccctccttggagttataaaagagccatataatttccacagcttccatatrccaccaacacttatggtcctacatagcaagtcccataaagcctcagtagacatgtgacatcccgaaaacagagcaatgcccatgatcctatgacatgaggtaagaaattcaaggcaccatggttccctctgacacctgataaactgtatgtatttattttttcctagaaaaaaagsgtatttgacacatatcgggagacacagtttcaaatcccacgttgaccatacacatgctgtatggccttgggcaactcctttgagtctctgtttcatcatttaaaaaccaaggttaataattcctatcttcacagagttgtgataacaataaaaatatattatgaaaatgaggaggctttataattaataaaggtataagggcattgattattttctcaaccctttacataaattagtagattattctaatcttgtgacagagaaaataaaataaatattgaaaagtattatgacagaaactagctagcttcccaccacatctgttccatcttcttcytgggcccacaggmagtataagcttcccactctcctttacagttagaaatggcaatatgactgcattctaacatgaaggaagtggtgggatatttccagtcttagccaataaaattctccagtgcctggtcctccatgccctttccccaagcatgagccacgggaagagaactccaaggtcctagataaaaaactaagccacacgataaaggaggcatatatgtgaatgaccaaatggaaagcctcttactgaccaggaacaccagttttgaatttcacatgtgcaagttatgctaaaccagtgagattttggggtttgtctttgacataattcagtaggacctcaactaaaagagggatatagacaagttaagtgtgaaaaggaaataccaccctcaatcaggctgccattcaaaaaaaaaaatatgccaccaagtatacagatgtcaactatgattgtcatattttgacaaaatattattagaaataataattgctcattttagagaactgatgatctatgaggttatttagggtctgtgtgaaacttttagttctctcaatcatctggggatcatgagggagctgagatgagatctaactttctcaataccatcaccagtgctcgtttccctatagcacactgctgtgcccactgaagtcactggcttttttttttttttttttttgagacagtcttgctccatcgcccaggctagagtgcagtggcaccatctcagctcactgcaacctccgcctcccgggttcaagagattctcctgcctcagcctcccaagtaactgggactacaggtgtgcgccaccacatcaagctaatttttgtaattttagtagagacagggttgcaccatgttggccaggatgatctcgatctcttgacctcgtgatccgcctgccttggcctcccaaagtgctagaattgtaggtgtgaaccaccgcacctggccaagtcccttgctttttaagatacagttagtcatgcagttcttgacaaaaaaaaaaaaaaaaggtacatacacaccaaccattacagaagccaaaatatcaagtctagactgacaacctctgcagctacactgaaaccccacatcactaaataataaaaaaatcctaatgtgactttctcatcttgaataattgttaaacaaatattatccctcttcctttctgccttctactctttatattcttcattttggaaagttttgtttatgaactaaaatattcgatattatatttagtacttagacacatctcttctagcttaccatctagcagaaggaaatgtaaatagtgatgttatattaaaaatctgcctttaatttaattttaaaatgaagggtaatggtaaattaatatggaagtttggacatgagcaatatttatttggctgaataacaaaccctctttaaagtgaatcctgtctcttaatttaacagagtgaaatttatgtttttataggcaattatgtgtcaattcagagaatctcagatttaaaagtggcaaccacttctgaatgaaaatgctttgagtatatttgtgtgatctggatatatttttcccagaaagtcattatgtattcataaatgtgaataaaaaccacatatgacataagcatgtcatataataaatcttagcaaactatatggagaaatataccacagaagtgaaacaatttttaagtatgtgtgtatatttatatatttgtctgttygtattagaatcattttatgacaaatggaataattcagtaaccactttaatttaatactgcatgtttaatatttattgagcaataaaccatayactaagcaaaaagttactaaccctcccccaccaaaaatgatttgctcgtattcactttttcccttatctaatgctgcaaagataattactttgtccctataataacatttccacaattcatttcaggaccagtgattagtccacaaagtttggcaggtttcagatcagaaatatgtgcataaaaatgctgactatttgaaagataagtaaataaattaagataataatttagactcatgttccccaagcttatctaataaaaagaatctcctagctttttccttagagtacatcctaggtaacagctaagagtcagtattattaacaagctcttaggtgattcaaaataagaaactggaaaacatagattcagactaagctcaattatcctattcattcatttatgcagtcattcattcattattttattcattcaatctgggcacactatgtgctggatacaacaggataaataagacatactctcagtctcatgaataaatgcaatgaaatatgacaaacgcttggctgaaagtatgtacagggtccattggcaacacaaaggaaggaggtgtcaattcaatctggcaggttgggtaaaggtttgtcctggcttcacagggaaacccacatttaaaccaagtgtcaaattagtaggtaatcaatcaccaagtgaagaattaaagaacatcctagtaagagaaataaatgcygggttcattgtgcagaatgtatcagctgagtatcaaattagaagacaaatctttttggaaactatttagagaaataatgagagctaaactaagctgagtcagtggaaaatagaagagaaggggggaaggatatataatattagaaaagaaggtggattggacctgggaagtgactggatgtggaaagaggaaagggagggattggagagtccaaaatagctccaaggctgcataaaacacatatagatggtgacactattttcaggtaaagggaataataaaagatgataaggtttgggggaaaggtaggaattcagtcttgcatgtgttacgttgggggacattcgatggatctgtctgttaagtagttgaatacgtaagactagaaccctggagagttctgagtttagagacacagatttgaaacttaacaacaggtgaatagtgagtgaggtcttaaagtggttaaaatcacacaaagaattttatagtgtgagaagcaggtcaagaacagaactttggacagttcttatattttagtaattatcagagaaaaaaagacaagaagaaaatgagagtgacatcagaaaagctgaggggagagagttttaataaaatgagttatcaacagcaaatgacccaaatatgttagaaaaagactaaaataatccatcagatttgttcctagagtggtcagtgattaagaagtggtatgagtttggaccaggcattgtggcttacgcctgtaatcccagcactttgggaggctgaggcaggaagatcacctgaggtcaggagttcaagaccagcctggccaacatggtgaaaccctgtctctactaaaaatacagaaattagctgggcctggtggcaggtacctgtaatcccagctactcaggaggctgaggcaggagaatcacttgaacttgggaggtacaggttgcagctcagatcaccactgaactccactctgggcaacagagcaagacaggaaaaaaawatatatatgtaaaaatatatatgaaagaaacagaaaaagaaaaagaagaagacaaaagaagtggcatgagtttaagaggaaatgggaggtaaactggcaacagtgaaagtaggctayagtctcaaacttgattagtaaagaaaaaagaaaaatatgcagatgaatgatcaaagtatacccttttttaaaaaaattagagaatctcagaattaaaaagagtttggataatcatctagtgcatttcttttaccccaatgcagaaatgccttccaaagtctcccttacatgtaatcatccaacttctttatttgaatatttccaagaataggaagcttattaactcaaaaaacgctcattgtaattaacttgtttttgaagtataagattttatatatattatatgtatacatatcatgatggtgaatattcataaactgaatacatctatgtaagcaatatctaaactaagaaacagatattacaaggkgtacagcagcccgccccaccccaccccaccccaccccacccagtccctgcccagagtaaacactatcctgacctaaatacatagattagttctgtctgtttttgaaatgtctataagtagaatcactcagtatatactctgttgtgtctgaatgttgtgtctcactcaacattatgtttataagatttactcattgttatacatggctgatattcattcactctcacaactgtatacttctactgtatgaatattcaaatttctttttacctaaggacccattgatgagcatttctgttttggcactattacaaaaagggctgtttgaacacttttgtacatcttttggttaacatgtgtacatatttctcctgcatgtatatctagaagtagaattactgggtcatgggatatgcattgtagatgccctcaaaatttttccaaagatgtttccatttatacacccactagcagaccatgagaacttccattgctctacatcgttgaccaacacatattttctgcctttttcattttagtcattctcgtcagtgtgtagtattatcacattttgacttaatttgcattagtataatgattgttgaagttaagttctttttcacacatatatatattgcaatttggatatcctcttatgtgaagtgtctgttcaagacttttactcacttttttattggattgtcttttgtctttatcttttttatttgcaggagttcttatgtaatctgaatgagtcatttgtcagatgtgtgtattaagaatatcttctcccactctgtgactgtcttttcattctcttaatggtatgttttgatgaacaaaagttcttagttttaatataaaccaatctctctctatatatatattttttatgtttgtgtcccgattaagaaatccttgtggcggggagcagtgtctcgtgcctgtaatctcagcactttgggaggccagggcaggcagataacaaggtccggagatcgagaccatcttggccaacatggtgaaaccccatctctagtaaaatacagaaaattagctgggyatggtggcgtgtgcctgtcttcccagctgcttgggaggctgaggcaggggaatcrcttgaacccgggaggcggaggttgcagggagctgaggtcacgccactgcactccagcctggcaacagagcaagaccccatctcaaaaaaaaaagaaagaaaagaaaaaaaagaaatccttgcctactccagggttacaaagatttttctgctatgttttcctctatttcctacctagttgccctgtttactatattctttttttctcataacttttctctgcattaatcaaacatccatttatttatttgtagtaacatgctaactacactttcttttactgttcttttagtgtttacctgaggaattgcaacatgcattcttgagttggttctatataattattacttttagtatcttcccagaattgctaaacctagaagttttaaacttcatttatcacttcttacttttgcaatggtattgatgtcacatattattctgtatgtattttaaatttcacaaagcatcactcttattgttcaatatagttcacattcatttgtataaaatgcatttacactctccagcattcttcaatcactcagatatttccaaggttctatttagggtcattcttctacttacaacaattccctttggtattccttttagtgcaggcctcatactgattaattctctgtttttgttttgtttttgtattttgggtttttttttttttttggtcagaaaatgtctttgtttcgatattttcaatagatatatttgtattagttacagaattgtaggtttgcagttatcttctctcaacactacatttcatttatcttctcacttcttttgttaagtcaattctcaatcttgtacttagagctctttaaagttttttttttgtttgtttctttgacttcatttaagatcttgttatctggttttcagcagttttactgaaatgtccctatgaatgtttttattgtatttatcctgcttcaattttgctaaacttcttgaacttgtgtgtggcggtctttccaaaattttagaaaattcttggccttaactcctcaaaaaatgcatctccccgtgtattctctcctctcctttgggacttcattttyacttatgtttaaaaaaattagcataacacaaataccatttacacaatatctaatttttccctttttctttctatgctttgagtattttttcagttcactaaacttgtattatactgtgcccaatttatcatatgtccctagcaaactcttaatttcagatagaggtaggactttgttttgtttcagttcaagaatatgtgtttgattattatttttattaattatttttttgagacacagtctcattctgttgctcaggttggagtgctgtgcacgatctcagcgcactgcaatctctgcctcccaggttcacktgattctcatgcttcagcctcttgagtagctgggattacagacatgcaccaccaagcccagctaattttttgtatttttagtagagatggctttttgctatgttggtcaggctggtctcgaactgctggcctcaagtgatccttccaccttagcctcccaaagtgctgggattataggcataagccaccatgcccaacctgtttgattattttctatgtgtcccacttctcywatcgaattttcttttccttcactttttttagtccaccttttaagtccttgccagttacctgtaatatctggatcatctatgtatctgcttcaaatgtatactttttcttttgattatttgtcatgtagtttcacctatttgtatgtctacgtactcttttattgtatgatagaaattagttaaagaagaactacagaattccaaacgatatcttccaccagagcaggtttctcactttcgatattaagcagaagagacagaggctggacgtctcaagccaaccaaggactcagctgggttggggctagattgcagttttagtggaatgtagtcttccccttgtttatctatacttgtaagccatgacactycctggattttgattgaaagcctggtatatctttatcttctgggccctgaaaaagttctctttcagaagttttcagctcatttctttatcttagggccctaacagctacaaaatttggtaaatatcttcaaaaagagttcaatggtatgtttgagtttggtgtctccaggctgccaagtccttttgtttgtttatttcctactaaaattctactgccttttggaagctctgccttttagaagcttttagcctagcctttggcttcctatgcagcctcaaaacacagcaaacatcccttggagaaagatgtgtgttttagatccctcaagtctccagtttgtcccagccttgcagtatcactaaaagttttgctaacttttcttactccccaaagacaccttccgcctaggcccagtccagtcctcagaccacactcagaataagcaaatgccctcagggaaataaatacatgcatgccttggaataattttcccttctgaaattttagttcttttagtccttgttgcttccacagctctaggaactatatctaatttatttggtttgtacagaaaaactggtcctatgacctacttgaaaatcaaagctattacattttaatagctctgattagtttttaaaactctaytgacacaaaattgactctcccatattttccattaattggctaaattttgaaacctggaacagtattttaccttcaaccatattgctttttttcatctatttaagattatctcccttaaatatgtttttccttcagtctaaatatcaccaaattctaaacttctattttatgtttaaatcctttgccatcctgatcatcatcttcagtaaaaactctcgtttgtcaacatccctcttaaacaagtatcaacaaaaatcctagatgctatgattaagcccaataaagagaaaaaatgagagagtcatattaaaaaaacagagatacaaaataaagaggaaaaaaaygagagaatcacacacaaaaaataatagagatacaaaagaagttatctagtgaggtgtttttaaaagcacatgaacaaaagatcaaaaaaaatcaaagacagataaacaaaatagagatcaaaaaaatgaaatgaaagcttccaaaattctcatgaaaaatgctaagcataatgaaaagaacattttgatcctttctaagtctttgtttcacaattacctgaattcattctcacaattcaatcacattttactgatgagttaacttggaaaatgttaagtaacttttgaccaataacaaaatgtaactaatagcagagtttctaggtttggatacagatatttatttcgcacagctacactcagatctactgaattatcaaaataatgccaagtagccattttaactcttttttttttttttttttttttgagacagagtctggctctgtctccaggctggagtgcagtggcgccatcttggctcattacaacctcctcccgagttgaagagatcctccttcctcmgcctcccaagtagctgggactataggcacgtgccaccatgaccagctaatttttgtacttttaatagaaacggggtttcaccatttggccaggatggtcttgatctctcgacctcatgatctgcccgccttggccccccaaagtgctgagattacaggcatgagccaccgtgcccagctgccactttaactctttttttttttttttttttttttgagacggagtctcgctctgtcgcccaggctgaagtgcagtggcacgatctcggctcactgcaagctccrcctcccgggttcacgccattctcctgcctcagcctcccgagtagctgggactacaggcgcccaccaccacgcccggctaattttctgtatttttagtagagatggggtttcaccatgttagccaggatggtctcgatctcctgaccttgtaatccacccacctcgggytcccaaagtgctgggattacaggcgtgagccaccgcgcccaacccactttaactcttttcatacaaatttatctagagaaaatgtccttctaagaatagacatttctattattcaaagagaaatctgtgtagattctgtcttatgccagctaaagacatgtatataaaaccacaaaatacattcttaatattatgaacataacataatttatttatgtatgtatgtatattatgaattataattcatttatgtatgaaaagcacacatttgagaatcaagctacctattaaaatggtctatatttaacacacagacatcatgctgaaaatgggtagctctctacctcccttttgcatattaagcaatatctgtgtaattgattctctctcttttggtacttaaagatgcatttggcacttgagaaagctatcttcagcttytaayagtaagtttgtttcctagagctgtttggtacctgaacaattcagatacatttgtagttactaaggctcagagaagagggatacaaatttggttgttttgtgttgcttctaaggatttctgcacacacacacacacacactcacacactactatttaaaatgctcttaactgaacaattttaaagaaaaatataatggtcagaaatcttaaattaaaaaaaaatcaaagcctactttatccataagtaggtaaagcaatggttacatttaaaactgtattaacaagaacaagtatttcattccaccattaggaaaagagttaccctgagagagatgccagttttacttaaattcattgtaagaggtaaatgagagcagagttgacttgggtctgggcacaagtaggacacctgccactattaagatggaaaagagataagaaaggtgaagttggaaatacttaagattctccaacgtcacgagactacatacttgcagttctgccaatgtttaacattttctcaaagtaagatatagacaaagtgctccagtctaggaaatcagatgggcccaacctaccactaggaggaaaaggaagctatgacattctgaagtttggcacctcgtaagtgcccactactattaattgcattgaatatgaactgaactgtgggttcactaaaagcatrcttctggagttaggaggccttggcaaatgaggctaaaaattaactcacacattcaaagccatctatttttaaaatgcatgataagcaacacaggaagcttttataactagccagcaaaatctgagctttcaatcaacaatttctttcaacgaaggtgtggagcatggaaagaatccagaagcacagatggtattttacatctgcacatgcaatttcctttttctccatttttatataaacctctctctttttttaagaatgatagaatttaccagtaaaakgcagaactacttaattgcctctagaaatgttcacacctccatttcacatttttagcagcaatttaactgcctttaagtatatgtagaaagatgggagggtggaccttttaagctcccctgtattacaaagtgaataatttcagaagattcaattcctccagagagctacaatttttccagcacttaaaataactgcactccaccatccttatctctaactattttcctaggattaatgctaacttttcactggatcttaaggctaaaatgaacttcagagatcatgttacttcagtcctctcctcaaaatatgagtaatcatgatccagtagggctggcagcttgttcaaggtcactttgctgcatagcacaggggaaaggagcaaagtccacctgcatcataatccacaatcacagagacaaatgtaggaagaccaatacatagctgtgtctccaagaayctatttccaggactccatcagaatgccaagcccttcttcttataaagtaagtcagattcatttgagmacatagagaagcctgacttttaaaatctaaaagcgtttctttaaaaattgaatacaaataacaggtttcactgtcatattacattcaaaccaaagataaataaggcatgaaaataatattggatagaatgaaattccaggtaaccaaacatggtacaggggactgaatttgtacatttaggtaacggggaaaataaaaatactacaacataaactaagagaaactttcaaaagcaatgttcaacttacctttagaaaaatgctctactgaaataaaatcaattgacatatcctctgtttttcatactaattcctctggcccaaacctctctcttgagctctagaattgaacaaagtacctccatgacatctccattggactatgtcaaaatctcctcgtctttatcacgtctaacaccacactcaccgccaaagcaacttgcattgtctcttgtttcaggcaacgcccccaacatgaagatatttgtgcatccagaaatctaaacattcctctgagacctcctaatcccttcagcaaatcctgaccctctacctcaatcactcctgaaacctgctaaatttcctccatctctgtggccactccctgcatccacactgccatcttgcttctctcatggatcttccagtagcctttgaacagctttgcacatgttcgctctggacctttgttgtccctcctctccagaatgaacttttgtcaatgcaaaccagttcttatcactctcgtgcttaaatccttcattggcttccactggctttatgataaagtctaaatccttcaaaatccctaaaaatttataaaatggtccacaaggaactagtggccctgatggctttttgagtcccacctgacccagtccctttgccccactcccccatcctgccatatccctgtagtctccagtccaaccattctggaccctctgtcccctgcctgcctctcatcctttgcacaatgttaccttggcttgaagcatgcttcctcccactttctacttgattcattcatctcaactcttgtgaaactttcttaggaaaatcttctatgatgcaactccctgaaagactggttccctgtatttttcctctgtaaccaacatcaaaatttgtaatcttatatttgtataactattgtttaatgtgtatccccttatgataatatctatttctatttattcgctcatctcactagcacctaagacagtaggtggcatattatacatactcaatgatcatttattaaatgaatgaattaataaagagagaaaattactaataagagacaaaattaataaagaaaagatagaaatctttttatctagatttctagattaacagaggaggaagggaaggggacagagagagaatataagtgatttacaacacaaatctcaccaacagcttagaaagttcaattttatgtgtaactatctgttactttggataattctgagctagtaggatacatcctaactagaccacagaccagggtcatacttggaccaagtcaatcccagttacccaaacttcagtcagcttaacagctctctctcaggagtaataacctctaacaaaggtattctgaaagtctccaaataaaagaacaccacttttaggttctttgcttgatctcagtaaacatcctcaaatgggcatgaagagtgatcttcccccaattcaagttctggaaagacttaatgtgtacttccaagactgtaccactatagtgcctactaactggccaaggtacagtgtcaaaagccctaaagcacaattgctctaaagtttatgtgtgtgaatatttgttctgtaaggaaatgagaaagaaaatgatcagaaagaaaaatatttgagagagggaccaacaaaatgttactccccttaaattatttaggaaaacaaagtcaaggcaattattatgatttataaatttttttctgatacctttttttttattattattatttgagaaggagtctcgctctgtcgcccaggctggagtgcagtggtgcaatctcggctcactgcaacctccgccccctgggttcaagcaattctcctgcctcagcctcccaagtagctgggattacaggcacccaccaccacacctggctaattctttgtatttttagtagacatggggtttcaccatgttagccaggatggtctcaatctcctgaccttgtgatctgcccacctcggccccccaacgtgctgagattacagatgtgagccaccgcacccggccctctgatgtcttcttaacatcacaattctcaaacttcagagcaaggttagcaggacacttgtaattttgacaatgcaaaagcagagagagacagaatatgccaatgcaatgcagtagaccacttcatttgattatgtgacttagaacactggcataatttggctcccattaagagttttctgaagtttggatacaatttctaagacactcttaatccacttcaactagaatgtacactatgaatttcaagccaccaataattcataatatctgggaggaccaggaataatccatatttataagtttcagagacaagatttgcattccccttttggtttctctgatgttctgctggctgtattttttgtgtggggatgtatgcaaggttaacttatgagcacacgctgtgcacaagaaactctgtgttatagaacaaggggaagagtcctaggaatttaagaaactatcataaatacagacatcatggccatgtaagccatggcttggcttgctgccagttctctgccacagttgcagaaggaacacagcgatagggcagttcctagatataatatctaacagatgagcaatctacataaaacatttatttctaagtttagaaaaccccaataaagccaataaattcgcaaatatctcccgaggatcagaggaaacaatagaaaaggcaaagtattacaattaagcatctgtgttataattaggaagataaaacataacaataagatagtcacagcccagcgcggtggctcatgcctgtaatcccagcatgttgggaggccaaggtgggcagatcacaaggtcaggagttcaagaccagcctggccaatatagtgaaaccccatctctactaaaaatacaaaaactagccaggcgtggtggcgggcacctgtaatcccagctgctcaggaggctgaggcaggagaatctcttgaacccgggaggcggatgttgcagtgagctgagattgcaccactgaactccagcctgggtggcacagcgagactccatctcaaaaaaacaaaacacacacacacacacacacacacacacacacacacacacacacacacacaaagatagtcactaacacacagcagcatgtaagaagtgtcaagagagragtaaaataaaaaattgctgtagttagaggagggtggttgtacaaggttttggttttgttttgttttctccaaagtcttcctacagcatgcagaatttaacctgcctcttgctgggatccaaagaggcagggagggcatggcaagaagaaccagaaggggtgacagccccaagtgcttgyatttcgttaaaaaattccctcttctcaagaaagaaaattattccttttacgtgagctactggattgttttgcaggctagagccattttctgctggattgggttttgaaatggtatttttccatttattttacagtatcttatgggggtggaaagagaagtatcagcaggttaatttctacctttcacagagaatctgctgtttacaatgtaagacaaaactaccgaagtatgggacacaattagggaagtcaggaacacatttaaataaactgatgttaatgaaaaaactgaattctgcatataattcccacttagaatgttaggtcccagcatcgcaatacatctactgacatgagatttttttttctcctcagagaggaaatttatrttttattatttatcattcctatgcttaagcttgcttattggatttattcaataggcatcatcttcatcatcttatagatgtgcatagaaaaggtgaagtaacggccgggcatggtggctcacgcctgtaatcccagcactttgggaggctgaggcgggcggatcacgaggtcaggagatcgagaccatcctggctaacacagtgaaaccccatctctactaaaaatacaaaaaattagcccggcgtggtggcgggcgcctgtggtcccagctactcgggaggctgaggcaggagaatggcgtgaacccgggaggcggagcttgcagtgagcccagatctggccactgcactccagcctgggcgagagagcgagactctgtctgaaaaaaaacaaaaaaacaacaaaaaaaaaaacaaagaagaggtgaagtaacttacctaaagctaaacaataaatcagcatcctatattagaatcctcagtcccttatatttaccctagttggatatttggcacttaaactatgatgctttccagtaataagccaacaattttaataatgtctaaatgtttctctctccttcagttctgacagacagagcttatacatttttgagcacatcaatttgattgcatctcaaatacagattaatgtggaaacagtaataattattggagaaatgactgttggcagggcatttaaaatgcttaattctctaagctcatttcaggtatatactgaacagtgatatgagagtgacaagcagtgaaatatgtagaaaaagaaaggacatgaggagtttttcaatcaatcagtagtaatacaatcatctctttcacttattgagaacttactatttcaggaaacacaaatatattttctctagcactaacaacaaaactgtaagatgcagattattatatccatttaacagtgccaatattgtggctcagagaggttaattaacttgcccaaggtcaccaatctaataaatgatataaattgacccattgtttccaaccctattgatagtatctgacttcaggctctcatcatctctcgcctaccattttgctatgcctgtattctcatatgtatacctgtcactgttgctccatatacattctttgctcctgccattttgagtagttctagtctcctggaccagctatgctgtctcatgcctctgcacttctgcctagaacagtcttcctacttttctctgaatgagttccttgtcttccttcaagactcagctcaagagtctcccctctgaggtctttcctgatcctagcccagcagaggtgatcatgccctcctctggagccagtatatagccctgtttattcactagtttactcactagttatgtttatatgcatggatccctattaaagacttagagctccttgaaaacagtattcatgttttatctttgaattaccagcacataacacagttcctgaaacttaatgttcacaaaataggagtacctaggctacctttgttagaagtttaagctggacccaaagttgattgcagattgcagtcagcattctcaagaaccaattttctttcaatgctatagagaggattttttaaaattaaaaaacagagaatttttatattacattttaattaaaaattggatctgctactccttcatttgctgttcatttcccctgttacatttattaattatcaaatatattagttggttttaaccgctgcttgctcccttgtagtccatctgtgctttcttctcaataatgcattgaagtcataagtgctagatttattgccttggtgattttcatggcacaaattgcgatttcgctagcactgagcagaaggaagagctaataggcaaggcagaaaatgcctaatcaatatcactcctggcataagtttaaaaccctaaacccccaagcagattttgcaaagggctatacttaaggccataatctctagaaatgcatttactatagtaagaagttgagaatcactttctttcctaccaaattctcaattacttcacaagcctcctaggaaagcactaaggtctttgaataamtcagctggcccgcaggagaaaaaaggaaaccgtgcaggaattagataggaatatgttatttccaagaagggccctttctcctaaagatacatccttttttctaaagataaaataaagtacttctacatcagcatagagaagaggatttctgaatatgagtgttaaaagacatcctaaggattagatatcagtcatgaaactgattggaggcatgttctaaactgggtagtctgggggatggaccacaatattatgagtcaagcaactaaccagattttgttgactagaagccacccacctcctatattaactacatcaatgaaattaagtgctcatgaggcattaactggattgctgaaccagacaggcatttctgctatagtcatgagttctaccagaagccacctgtgtgttctcacaaaaaagcaggtgttcacctaagggtcaggagaggcaagtgtgatcaggggaccagtaagcatcctggtataaagaccttcattactcagccttttaaactttgaatccctttaaatatccataggtctacctaatttgagaaaaaaaaaaacttcctttattcgaaaccacattgctaatgtcctcaagtaaaaagaaagtgtctaaagtgcaggcttagcaccataacacaaatataagccaaatagctgccttttcatttaatacactatgaagaccaagcaatcaatataatgattaggaaacagttccaatcagttattcaatgttctttcttggggctaccatctaggaaatttgtctcagtgcaaaaaaaaaaagtatagtcctatcttcctggccacccccactaaagcagaataacctgatcccactgtgttatgtttcgttgtctacctcaacacatttcaacaatgtgctaattttaactacatttgagttatatgtgaattgtttttattttttagaatttgtacattttaattttccttgagaagaagctaagaattattcagatactagacagtgatagcagtttcacaataagaacttgtgcatgtattaagcaaccatgtggctttccctctaccctatcaataatacatatatgtctcagtttcatgtcccttaataaataattaagaaatcactaaaataaacagccaaggcattcaaaatacattmgttctccccatagacattgggatggttcccattacatactttttaagagtctgatttacttgcaaaagctacacatattttattaaaatgtaagtaatcaaagcaaaatttaaaagcacatgaaaagaataaaaataaagataagaaaaatctaatcagttctctattaggaagggagagggacacagtcaattcagctagaaatataatggtttccaaggtcaatgccagttcaaggaagaggttcgttgctttgcaacacttttcagggagaaggtaggatcaggagctccagtgtttccttmtaaacaagcacaaaatatgatatattaaaacacctatatttataactaatctcaaattcacttatcacttttaacttggtattcatatattcagaataataatagaagctcagagatttaagcaatctatcctcatatgtattgttccttgagttatcctcaaatggttggcaaaaatctacacctggagtgagaattccacaaatacttacagagaaggaaaaataataggaagaaaataccaaagatgctcctgttgggcaacagtcactaaccatgaccaagttaaaaatttttatattatctaattgactatcacaacatcatgaatacattttaaagctaaatctgaagtggagaaccaaatattaaaatatatattaatttaaatattgtttataattctactctaaatttcattcacagcagaacaccctcagccatgagaaaaaatcattttcaccctttagattagaaaatttcctgatcctacattagatttccttaaccatatatttttacaagattcatgatcagtcctgcctttccaatcttactacttgggtaacagatactttgataacttttataatggacacttaaataacagagtaaatagaatgagaaataataaattattgctattactcataaaagcataagattaagctttttcatagagaaggctgtatcgcataaaaaatctgcctagactacgtttataaattaaggttcatcctttccttcattgctgattttatatcattcaggttatagattagcagtataaatgataggatctaataataagaaaaccagtttaaaataattacatgaaactccttcatattatgttatatttgtgccttgtatgttataaatatcaagacatgtcaaaggagttaaaacatattctctaagtagggtatcctaatgatactgaagatcttaaccttgagcttcaaatttgctgtccaaatatggtctgaattatttttaatttttaattgcattcaatatctactttgaactgtgagtgaaaagcaaataattacattgttaatgagacaagatacactatcaagaataacacctcacattttttatgtagtttattttttaacttgttttgatcaaagccatagttgaaagaaaattgtctacatatatatgtggctgatcacataatagtaatcaaaaatatgactagtcttcttgtttattatttataagaaacaaaagaaatactacatcctatgaaataaagtaagaaaaaatgaaccctaatttgtaaatgctagatgcaactgtgaaaaaaaaaatgagagggactaaaagtaaaaaacataggtaagacactgagaagagctattcaccacatcaccctccaatattacctccaatcagtcaacgttagtcaccctcatataatctatgtgtgctcataaaatttagaagttgatctttattaaaatatcaacaagaagtattttattgcataagagctgtattgtcagacttacttttaaagtttatgtttgtgtcatataaaaatttgaaataatgagttagtttacctttacatattagctcatcccttattatgatattttcattacaaatgtaaatacatagacttggttataatctattcagttccctgccaatctttccactctcaagaattttcaaacttttactaatacgcaagcctgcacaaaccctgagaagtctttattctctattgaatttacaatctagagagatagattatgttaatatcaatgaaataacagcaatatataaataagaccaacctggccagcttaaacatgacgttatctatataaagcctcatagcaacagcagaagatcttkccctccactctcatcatatcctacacataattccaccctaggaacatggtgtttaaaatggcttgcttgtaaaatcagggaattggtttcattcacccaagatctctaggatattcaataatgatggatggatatgatatggacagatgaatgagtggatagatggatagataaatggatgaaggggtggaagaaacagtatattttttttcatacttatgtggatataaatataaattttgaagaaattcatagcaakacctcatccctataaaatgaaactcatctgaaggattttctttaaaaaaygttacttgaactaaaacaggtgcaagatttttatgcaacctggcagatgcatacagaatatcacttcatttagttgggacagaatatcacttcatttagttgggagataatctcaaccaaagtctcaattaatttagtaatgaagttgaagagaaattcaatgcttatcagtaagtaatcatatcatttgaaagcctgtttggatgtcagctgcttgggttcagcaaatcctgaaatgctcctctgcaatatccaagtcctgccaaagcaggacaaactatttttagatsaggcatgtcaaaaacgtagtctgttttataaagaatgtgaagactacatcaatatagtaaggaagaaaatgccagttggaaagcaagtgggctattagaagtcatgagacacacacacaaacataaatgccaatgttcagggaaatcatatatagagcctctctgtgagaccaaaataccctatcagtcatagatatggagagttctttccaccagttgcttctataacaattccaaacactagtatctgttatgtttgtttgctttataatttttaatataatgtaattttcattctgccatacttatataaacctagaccaaaaacattaactgatgtagtgttattataagaccctccagtggactgttgtgactacaatttccaaggggattaaaaaaaggaaaagaagaatgagatgttttcatactgattagcaactgcacctcattgcaccacagtatgaagaaacggatttggaaacacagcaccaagattagagaggcttttgagccatagtttcaatttaggtctcatcactttacctggcaatagtaccaatttagcaggcactgggctgtgcagaaagatttacatgtaaatgaacacactttggggcattttgctttgcctcagttaaagagaaacatcacttttcattggcactacaaaaataaaacagaggttaacacagaagggtccagggmagagtccattagtggaaaagctaatttggcagctgcatcaaactcctggagatcatgagcagtgcttctaggaagcactaaagagtttgaaaaacacagatattgtggaagttattagatgataaagtgtacacataacattttgcaatttatagggggaaaatcaccaaattaagggatgattatcttatttttaatattcttttaaaaagttttatacatttagatacacaattcataccttctctaatataaatatattaaaataagtttaaaataaaataaagttttaaataaaaataataaaggatttttaaatagttaaaatcaaataaaaaataaagtggatctcaaacatcataatgcagtgccatgtgcctcatcattagtgtggatttctgctcactcattttagccctctacctctaagctaatgtcataatggcctggatccttacataattcgattttaatagattatctcagtcatatagttcctataaagcccagtcaccgggggatggaggtttgtgatttcttctcagactatattaactaacccttactcttttctttcattcattcaagtattcattcattcaataaatacacatatagtgcttaataagtataaggaatcatgtgagacaatataaggcatggagaaatatgattagtcatagattcttgtgctcaaaaaggttatggtctaatatgagataaaagatctgtgcaaataaagacataatctaaaaacagacatataataatatcatgtggaaataccatgataatttaaagagaaagaaagcaagaacaagagtgagagagtaagtgagtgagwgaatgagtgaaaaattgagagatgccaaatggggagataagaaatgcttttcctacatggaatcctctgtcttctgcttgctaggcatgtattggaatggcttatgttccatccagaacccttcaggacaagaacttggcatatggcccagagaaggcattcagcaaaccttcactgaaggaatgagtgaataaattaacgaatgaatatttctctttggttttgtagacattagcatgtgaatttataaaaacaatgcatatagccaatccatatttattttttcttgcaaaactgaaacaaaatgcttcataaaacacaaaatatattcaaaagtggccacatcatttaaatagttaagattttttattgcaaagataaamggtgcctgcattacataagactctccctgttacttagatggactaggggcattactgaaagacaaatttgcaagacacccataaagctaccaaaattcagaatgttttttccttactctaaatgcattttgatgcaaggagaactgtgacctttcaaatagaactcttaagtttttttcactttatattttaactttgcaggatttcactataatgaagtttttgcacaaataccactaaaagaattattattatgttcctgcaaaaaatattttgtctctcattattctcgttacagacacttgaaaatctgcaaatttatattgagttcctgccttattatcctatactgtcagccctccatatccataggttctacatccataaactcaactaactgcaaattgaaaatatacaagagaaaaacaaacaataaaaaataacaatacaattaaaattaatacgaatagaacaatacagtataatgactacttagatagaatatacattgtattaggtattatgagtaatctacaggtgattttaaatatatgggaggatgtgtgtggattaaatgtaagtactacacaccattttatataagggacttacataaacctaagggaccccccataggttttgctatcgggagtcctagagccaatcccccatggatactgagggaggactgtacttgtgacctcagaatagtaactgttactttagttggcaatttagctcttaagaaaatataaaaattaagtaccagggcctggattacatttaagaattataaaggttattttcaaatgttaggtgtttaaatttaaagatagacaacataaattcaggctcttaattatgtgcttcttgaaagtgctttcttaaaaaataatttactagtagaatcaagataattaaaattaatgatccaacagcctgttgtactcacaccaattaaccattggaatactaaagagttctaggagatagattgctcttcgaacaaataaatcagtttcaaagtaaagtatattatctctgtgggggagtctataaagtaaatattgaatcacttctcagcaatatggactcttgccaataaatctcaaaaacaacattattttcaaagaaaaaagatggctacctcatttggcacacataaaggatgaatgatatagttagtcgaatcagccaatcagagtatacatatgtgtatatacatatgtgtgtgtgtgtgtgtgtgtgtgtgtgtgtgtgtgtgacagaaacacatatactgtatttgtctcctaggccccccatccattgccttcctttactatcttgcaccatttgtccatccctttcacaagcctataattttgccagagagcagaaattgtgtcttcatcatgtttgttctccatttcccagtcctgtacttctgcagcacctgcctagctatgttttacataaagaaaaaattcaagacaagtatagtctcatatgaaacaaaataatcaaactacagattaattcaagtttctttttgcacattttgttaaaaagaaaagctaacatattttaactggaaaatatctgccaatttctaagtcaacacagggatctaactttaaaaaccccaaaggtcttcctgaacatttttacacatatatgtatccaggagtatacttaaggttcctgtccccatcttgagtgttttcgagattggactcttctttctatgccttgtattggtcaatatgtgtgtagtaagaagcagagaactctgattttgagctgtcactatcttacccacatcttaaatccatcataaactacgtttctttcctgaagacccaatgtgcaaagaagcatcataaaactacagtataaacataggaaatcttaatgttcacactaatggaaataagagctaaatgttgagaattagtgttacagagaatcagatgcctatattgtgttcacctctctaggttctaaggccagtaagaattagatagagtgatagataagcaacaaaatgtagtggttaagaaggcaggcaaccacttaggcaactcactagacgagtgattttatacaaattatttaaactatctaagtcttccttttctcaactgttagtcttagaaggcttaaaataggcaacctctgtccagcatgtggtatagtacctgtgctacatagtaaatgcttaatgaatgaaaataatgaagagaatattagagacgtgtccaggccacgcatcaactgacagacgcaacaaatgcccacagcttcttcaggtggctaggcagagtaacagctgcagaaatcctaaagaaactaaggtagaacctgcggtaacatctaggccgtccctgacactttgccagggacccaagctgcagtgtgataattgcttacactatttatctcatatagcacttatattttatcaactgccttaacacttagaaaccaaaatagtgattagtgacaaaattttcaagctgggagtcaagccggtagaaaggtattttcaatcaagagtttcttaatattactcaaataataccaaagggacagctttctattttgactctaagtaaaactaccagcctgtatataaaggtcaagcttcataggacaaaataaatgttgctagccaatctccaaacacacatcaaattgcgcataccttagcaaaacccaaagctagttatgaaaatcagcttatataaatgaaacagatagtagaggcatcaaaatgaaaaagaataaagtcatcatcaagtgtattttttagaaattaaaacatttctttaagtaaattgagaayttaaagacagtgtgatacatacacaaacatacatgcataaatatatacaygtatatatttaaggaatatatgtaaataatatatttaaggatgccaatttcccagaataaagtatactttaaatcccacttctttccaaagacaaagaataatgcttcagacatgaccaccccccaaaaaaaggaaaacaaaagaagaaagtatttactattttctacatattgcttacatttaaattaaaaatatagctaatttcctccaggataaatttataaatgcccagttttattggcaattctacagattagggagaccagtcatagtcactaaggtgaaaaaggtaatgatactttgagccgagatagtggtaacagagatgagagatgtgtgtgcctgtcattgatgtcaagaaagtaactggcaaatcatgggacatttggaacaagagacagggagtcaaagtagatgggcaacaagtagattaagctgacttaatctaataagtattccctagaacaaaatagggaccaaggaagaggaaccagtttgtattcagagataatgagctcagtttgaaacaaatttaaagacaaattagagaaatatcattaactagaagaagactgaaatgcctatttcttattttatatgttagtaggtagaaataaactcaactgaaaaccccttaagtttagtagatgaaaaataaaagtaagaaaatacgcctctgaatttcaagataaaatgcagaaaaacatttcgatagtgacaaaggactacatctaaaaaactgaatttcttcattaagaagtctgtttctttcactgtatgcagatgatcaaaaatgatatttacaaaaaccctaaactatcatcttttcaacaacctagagagttagaaaacttactagataacattcagccttacaaaaatgggaagatttcccctgtgatatatgaggagagcatgagaattctctcaatgagtagagatatttatacatactaaaatctctattcagacataacacttaccaagcaaactagagagagaattctagagaaggaaaacatggcctttttgttattccttcacaaaagaagactgtcattttctgttcttcagagtattttgtactttaaaaataaccttttctatccaacagaagagattcttgagtgaccttaaccaaattatgagaaattcatatgaatgttcatatatatacaaagatatttgtacaaatatacctagatattacttatatagttaatatgtggtaaaaattattatttttacttaatcacaacttagaaactttaaaaaactattcttatcctttataatcacaaactcaaatattacatatgaatgggaaaaagaccattagtaattagttatttttaaccatcyaactttgtactttttatgtgaaaggtacatagcattgatgttgatacgagacastgatatgagacttggcacatcactggaaaattactgctagggcaaatatcattgatgtcaagacactactagtgtagcagaatcgaaattattcctaagggaatttcctaaataatgggtcagctactactactcattattacaatagcatataacgattttcttagctaagagtatacatgataatgctttctagagagtaagtttttatacccctgaatctccacaattcatagccttaagaagaattacctttcttggaaaacggtgatttagaggattaaaagaaaccagaagtaatgataaacaggagtttagcagggtaaattcatggagagaaacttaattctcagaaagatatgacaagaagattctatggacactttaaattagagccttccaacaaaagatctggagaagcaaatgccttattagatttaaatttcctattgcccttccctgagcctattccaactagctagttcagacacttagggtaactgtttattttatgaaataatgtatttgggtaacgttcaggtaggttgactaagtcatttattgtcaaaatgggacgataagcataaattgggactgtactgttgaacaccctaatctcaggagagaccatgttaataaaaattaggtaaaaatggagaaatagagagaggttactgtgaaaaaaagaaaagaataaaaggacccaaagtcacttgatggttatgtgaagagaatggaatttattgtgagttggtgacaggaagggatctacaaggttgagtcaaacagatttgtttttttaatgccagctggtagcctctccattactacccagcgaccagtcattttttggtgcaaggacataccctcccaacaaaactgaaactcccccccaacaaaagattgctgaattcacagtcgttgcccaaacctctgcatcaggtatttaccctggtgtgaaaaataccatatgcagattttaatttcttatcattttagatttagtttatttgaaacataaataggtttcatcctagtcacactcctttttcaaattatggcactaacacaaattgtcatttgccatattctcaaacaactgactataatttgaaagggacggataatctcttcatggaagaaccaaagaatacctcttaaggcaataccgtgatgtcaggcagcaggtagtgcactgctacttgagcagaaaatgtgttgcacactcagcatctgacttcctactcgaattaacttatgtaaaaatctaataccctaagctgagaaagtaatcaacatatgatgttgatatagagaagaaaagatattacaaacaatatatgtaatatttttcatgaggaagacttgctctgacaaagaataattttctcattataaataattagaagcaaaaatatccctcccttacaaatttagataatagagactatttttatttttattacatttargaatcattgggttcctaaatggatatcctacatggatattctaacgaaataagtatttccagatagcatagccttttaatgtcatctcattaaacagtgaactaggtcttttaaattgaagtaaaatttattttcattctacatattttaaaatacatgatagcaattgtatttaatgtaaacatctagtaaattattatttatagtaattgggggaacagtgtataattaaaaagaaaattactggccatattctatacctaaatcacttggtccttccactgatatttaggttcttcatattgtcaagcatggtgcctcatatatcacacagtttcaataatttttatccatctgattagccacaaaagaataaacataccttgtactacatctgtatacaatacttataaattaaaaattgaggaagaaatgacttaaatttaaccaaatattttatatattaaaaaattatcttacttgacattccaataaaattgtcagtgcaaaatattcataattcaacaaagacttacctgaacacaatttgaaaaatttatgagtaaatgtacacacatgtgcatacatataccatatcatgtatatatccataggtatgtatactatatttacatgaatcttatatagatgtcatgagtatgtaaaagtggtccaaaactgatgtatcaccaaaatttgcattttccatacctgatttaaatgattttgaaactataagtaattggctttaagtttatacatatatgtgtatatacatatatgtttatatattatatatgtatctgtatgtgtgtacccctatatatacacatgggtatatatccaatgctaactctcttaaattttcaaaatcatttaggtcaacctgggaaaaatctactgtgatgctgtattcagatatggctagctgttacattctacttactgatacatcttactatgttattttattgttaataagatagaatcaactttaaaatgcactctcaattacatggaaatgatatatgttaaacattcacgttgcttataagttccatcctaatttcagaaataataaaatgtgaaaaaatgtggatttatatttaaacagtataatcatggcataaagtatttcaaaataagacatatccaacagtaagaaactcactaaagaaaataatatgtgggatttttaaaacagatcatcagagctaactatttaattgataatggttcaaattaggacttgcactctgcataccagtcagtagccttgatacattaaatcaagcaggaaattgtgtgtgcacacacacacacagaataaatgtatcatggtttattatttttcataaatcatcaccatagaaattacaaattattcacagtagagttaattctaagtaagccagaaatgattctgcatatatgaggcataagtttccatgacgaataaggacaagtatataaaatcctacagatatatgacccataacacattacagagcactgatttcccagaggataatgtaaaactcrtgtacccagtaacagttctatttttgttctcttctataactcaaatctattcatgctgcacatttacttttacataaaaatgtattttagttatctgggctatttcatctgtgacaacaagattcttatttattttaaatggaagtatcctattttattcttaagcattttctttacgatctttcagtcgccttgaccattttttaaagtatgtgatatctttcattcacgcatcagataacttcatgttttaaatcttaaaaatccacataaataggaagagttactctggaattttcatttaataagctggattacatttctctaagaactaagctatatatattttatatgccgaaatattcatattataagcaaataatcttaaaagaagtgattagttttattttttatttttttgattacttttattaaagagataaaaggtaatatttgctccaggaattttcactgaagtagaaatacatgtaagtagaactgtagggatggaaacagaagtggcaaagacggttctaatgcatggagagaaggggaaagaatgtaaagatgcagttaataaaaaaataatacctaggccttctatttttcttagctttggactctaatctcagctaagatcagaaaggaatttagtctgatgtgctcaaacaaatatacattctatctgttcaccaaacaagaatggcagaagcttttatcctccagagaattcaacagcatgaattagtaattaggatattaaaccaagatcaggactgaaggttcctgaaatctgcctactttttaggacaagtttttatcttattgaaaacgaaatgggaaatatctctagactttgatatctgattatatttcaggctcccctttgtctgtaactgtgtttcccttctcaccatggtcatgcttgctttttccctcacctttagaacttgctttctttagttggcaagggagtcccttcctcatgtatactactggttccttcaaactagcatcatcctttgatgctttttggactttcataggaaccatagatttttcctgggaatgctctatgctcatctaaattttagatatatggaccaaactacagacattaatattttaaggaatcttyatgataaaataaatattaagaagtcatgggtaagaatagccagaatggcttgtctagataattctcttctgcaatggttatcgaagtgtggtgtgtggattaatagtccagcatcatataggaacttgtaagacatgtggattccaggacctataccagacctactggatgaaaaacttgggtggcagggggttgactasttaaagaagtgggtggtgatttttgtgaatgctaaagtttgagaatcactcttgttctattgtatcctaaccaaataataggataattaacactaataataataataatagtgtttatcagttctaaaaacacaattattttcccagttagcgaaagcaattttctgactgttccaataaatcttttatcattttcagaaccatgtaggctactacttatccraatcttctagtaaagaattaagcagtttcatcccaggatttaaaactgttgcactgatctcaccatatrggaatagggggcattagcgggataatatagggacacctgggccacagggccacagatataaccatggaggttagtcaggtcagcacttcagtctctaaatctttcccctaaagttgtccatatttttataactgacttttctcatgtcatttttccccagatacctttatcaatgaatgtgtcaacctttctggcatacgaccagcccacaataagttactgtggggtgcatcatgaacttctctcccataagtcctttgaaacgaatgcacaggaagatacgatggaaacacacctagagactgagctggacctgagcacaatcacaacagctggccgaatcagtgaccataaacagcagctagcttaactgagatcattggtagccaggggttgctaccaaactttgtaacctcaaggacaaaatgaggaagatgtgttcattgtggactctaaaaacaaaacaaaacacaaaatcccctgttcaaataaacaaaaaatccaagattgattcatgaaataaagaagacatgaattgttttaagtctacactttgtaattagctaagttgtgcagtattttttgacttaaacagagtatgaccctgaaaaataaaagaatctttttttttcaaaactcatcctacctacctgtaaaaactgtacaaagctaatgtatttttcatattgtaaagtttcaattgtagaaacaactggtatgtacagtaccataatttaattacattttactttaaaaactttacacatttcagtttctaaaattttaaattaacaaaaattatttcttgtgttattcagagttactcagttttgtaaggactgttttgttactgcttttgtgcccagaaaccttgactctaaaattctgtgctgtgcgaaacatgcacgatttttattatgcttactgcgtagaattttatctacttgttccagaaataatacattaaccaaaaaggatttaattgttcagacttgtaagaggttcttcaattacataggcaggtttttcttaaaaatgaaaaaaaaatcaaagatttttttaacagttctcagacttaactgttgccttgaattacagcctagtttctaagcagtgaaatgtaatgataaagagggatattttaacatatttccgaatgaatgactcattatttcattcttttgagtaaccattgttaagggttgggggaaagcatggacaaaacatcactggaaacaaaggctgtaaccacagcaacagactttgtgatacagttaaaaggtgcagctgccagtgacaaataaaaacttttgttacatctcattattttcaggccaaggtgggagtatagtgcataataattgtacagtagcaatttttatcctaattaacccatagcggtttacctaaaagtaaccatcagtcagtgcaaaatgtgcctggttcttaagacaactttttatttagaactgtgagaccggtattttggaaacatttcaaaggaaacatatgaatttgttttgcgttgtgcactacatcatttctctcctgaggaagaattttaaacatgtacagctcattcaatatagatatgagccatggtggagaactttatcactcaagtagacggtaaacatccttaatatgttctaaattgtttatattgctatccataatgggattcacctccaaattatcaaagaaataactcagagtaatttgacaccagcccagatcatatattgattatacaattgtattataaagttcattcaaatcaaattaagaaaacctgagtctttagaagctgaaataatcaacttgtttgtgctgtttgcttgacataggttattgtttgaaaatattgttactttatcaatagtaatcatgcattcttgtgtttttttttaatggaaaactgcaagtttcaattactgttgcactagaagtgctttttatgttgtcattttatattcatgccatcaaaagtagattgacaatacatcaatctaacaggggccaatcaaaacaatgaagaaaagaataactgaaaacaatgtcaaacttttaaatttttatctcttccaaagaagttatatctataaaatctagttttatgcaggtttgtcacagcaaatgtaaaagcggattcaagaagaatgaacttaaaaactgtggagcaaatttttgttgaaaatatataaagtcagaaagaaaaaagatgtaaatgttggaagaagcaaattctattactaattcaaatgaaactaaatgtcaaacacagtacttgtgtcaactatttagcatcccagattttgtaacatattttgcataaattatttgctcttcaaaaatttttgtcattttaaatctaattttaatctttatgttttccattttctaatttccttgcaatgtattattcttattcttaattctctacattgaaatttggctttacgtcgttagcaaatttataaagggttataaagctatgattcgtgagtctaaaatcaaatgcaaaattttatttattatgtaaaccaaaatgtcatttgcaagttttctcattagaagttatccttgcaaagatagaaaaagaagaattaatttgtgtaaacaagcacaaattaacatatttgttaataaataggtttatctactaataaacctatttctagacacattcaaattgataatgatttttagaaatgttaaggttccaaggagtcttacaagtgtatgcccttgatttcctgaaggaaaccactttctttcttaaatattttaaattcatctaaagtgaacgactataaatagaagcaatcaccttggaaccacagctctgtgcaaccaaggccctaagctacaccaaatacgccaggaattttgagacttctcatctttaaattcaaccaaaagggtctttagcaagaaaaaaaatgctggatgatgattattattatttttgcttaatttttattttgccatgtccaggttaagggtgagggtggtgacaatctgaaagactgtgtctggaatctttatcacatatttccaatttatttcagtttttgtctaaaacttgcatttctaacctatcttttccagcatttgataatctcccatttcctccttctaacccccattcctatgtctcccttcctgtctattcctcaccgatttaaacaactgaaatgtttacttatgtttggagctgaaaaatggaaagtttcacccagcatggttacaataacagccagcagctgcagcaaaccataaagttatgcagtgttttgaagttcacaaaccacattttacataaattatctcattttgtcttcataacaaccctatgaagacacattaatctcaaagaaattgagctcttaccccaaaacacagggccaataattggtgcagttgaattattctcaaaatttacaggctgttagtctttccactgtactaaaagatttctttctctgatcagagcaagagaacttccagagataatggatagaatgaaagaatatatatctatatatatttgacatgttgtttagtaatccctattttaattcaattctccatctgtaaaatattagctaactgaattatttctgtgttctactctgggctctcacattaaaactctgttcaaaaagtttaacaagtcacatatttcttaacatacaagttcgtttgtgaatgtgcagaacagatgctcccaagatgtggatgcatgtaggccccgaggtacagacataaaatcaaggaagcacaaggaaagaaaccccaaggaaaaaaccaaagaccttctaaattgagactgcataattataaaagagatccatagtacagggttgaacacatgttcaacactttgtcaactgaacacatgttcaattcggagctaattgggaagacttacataaaattctttttctttttttcttttggcaagatttcttcttaaaccatgaaattttttttacttgtaataatagagaacaattttctccattttccttataagaaaaataaaatataatttatccaaattgatgtatagaacctaaaacatacgctaacttgcaaataatatattttactgatcaactcatttttgtcaagtctctatttctagtccctcctgaatgttttggaaaaccacaaaactatacagattaatacaaattacatttttacaaggaaagaaaacattcccaaatttaacactcaagactaatcacataatcctattttgaactcagatctctctgactccattgactgcttagaaatagtaaaatctttttgaaaaaaaaattttctaaaataaaactattgtatatgagagtaaaaatatatttgtttttgattgttcctgactagaagacagatatcatctctcaaactaaacactcaaaataagaaattgaattcatgaaaaccaatacctgatgtgaattgttgttattaaactgtataaaagaaatgcagatgttctgggtatgtcagagcatgcgaaagaagttatgggactggcaggtatttggcctcaggagaaaaggtgaaaattttccagaatagatataataacatcttatattggcacagctcttaacagtttataatgctgggtaatataacaatctcctaattcatcaaaaagtctcaaggtgcagatgaattggtcttgcaataagaaagagcttccaactcctcccatgaccttcccaattttccccaactgtctctaaatagggaggcgccaagtacaaaggacccaggagcaatgctttcaaaattctgatttaccccaaaggtagggtacctggacaatcaacaattgggcttcattttatcatcaacattaatgggaaagaaatgtttaaaaatttaaaaccaagcaaacacacacacacaccatcaaagtggtgatgagtcttttttgaaggtctctcatgacttgcattatagttttattgtgagataggaggcaacttatatttaatttatttagggtaaatttcacattttaaaaagtccaccattgacttttttattctatgaaggacagtgatcttacagcagcagagtgcctcaaccatctaggacttaggctactaagtttcttcctcctagctctcatttataaattttgtgttatatgatatttgtcttcctgaaaaggtgagtgaaaatttattttgtgtaaatcaaataatatttcaaatgtatcaagagaccttgtgataaaggaaccttgaaattgctttttaatctaaaatattacctgctaatttatcttttttaaattgatttccatatatcttgtgttattataacacagcacacttgtactacatggtttaaaggttctgcaagacagtcttttcctcagtctataggaaatgacggtctgactccaggttttgagttggtcagttgagcagtttcagtcatttccacttactgactttatctggattaatgtggaaaatagtagtaagacaacatggatggataaatttgacaaataattttatttgtttaaacttttgccacctataatatccttgaagttactattaagaggtcaagttgactccaaatcccttgtgtcaatactagatttactgaatcagaaccactgggatggatcccaaaatatgcattaagacatgactgaggtgatactaatgcatgctaagttttgaaaaatagtgctcaaatgaatttatttttcctaaatcattcaattgctttctattctaaagtaaaattgtgaattcttgtgctttcccatatcaatgtgaatctagttttctaagcctgactgaacatttttcttgactgaggaaagcataccaaaagacaactatatataaaatgctcaggttgcttcctgacagactgttgtttatagattttattccccattaactctttcgagaggcatatctgaaaagtcttaaggcttctgggttagttacttgttagttgcacccatgaatataacaactgaaaagctggaagtggggagaaaggcaggaagtaaattatgatgtagcaggcactatgccctcctctcatttttaaatcattttaggaaagaagtataaccactattttaaagaaaggaaaataaggctcatagtaattaaataatttgccaaggctcacacagtggggttgaagattcaaatctagatttgttaggctctaaggatgtgctcctacccccatcatagcacattttcaaaagtgagaagagattataatcaacataatgaggcttatatatattattctgaataatttatacagaattatttattctgtattcagaataaattcttattctgaacacagcagaaaaagaatttgcctatttccaaatagaaaaattatcttacactgtgtagagacttccttcaatatcctaaaccagaggcctaatggaaaaaacaacaacaacaacaatattttcttgaagttttatacatggttccctaaaaagagtagacatttgaaagaaaaatccttcaaaacataaatacccttgaatattgatgtcatatttttatttccaatcatcttagcccttttataaatttacagccaaaattacagccaaaattacagccaaaattgataaagaaatatcaataatataaccttcaactggctgaaaaaaagaggtcaggttgccaattttaccaaaaactatatggatgaatggtcaataaagtcaccaagtacaaatgacaaggtggagaaaaacaccaataatctacagtcgcaaactgtagcaatgacatggcttgagctacagaatatttcctgtgagtgattttaaatggcaatattccttataggagtattataacttacacagatgatatgggatctggaagcatactacatcaaaagaggctgaaagataacctttataataaggcagac
